(19) United States
(12) Patent Application Publication
(10) Pub. No.: US 2023/0250178 A1
(43) Pub. Date: Aug. 10, 2023

(54) SULFATED PEPTIDES FOR CHEMOKINE RECEPTOR ANTIBODY GENERATION

(71) Applicants: BAYER AKTIENGESELLSCHAFT, Leverkusen (DE); BAYER INTELLECTUAL PROPERTY GMBH, Monheim (DE); BAYER HEALTHCARE LLC, Whippany, NJ (US)

(72) Inventors: Sandra BERNDT, Hohen Neuendorf (DE); Katharina FILARSKY, Düsseldorf (DE); Philipp ELLINGER, Solingen (DE); Beatrix STELTE-LUDWIG, Wülfrath (DE); Sabine HOFF, Potsdam (DE); Helge ROIDER, Hohen Neuendorf (DE); Ernst WEBER, Langenfeld (DE); Mark TRAUTWEIN, Wülfrath (DE); Christian VOTSMEIER, Paderborn (DE); Nikolaus PAWLOWSKI, Köln (DE); Uwe GRITZAN, Köln (DE); Pascale BUCHMANN, Leverkusen (DE); Christian BERTLING, Wuppertal (DE); Oliver VON AHSEN, Berlin (DE); Wiebke Maria NADLER, Langenfeld (DE); Su-Yi TSENG, San Francisco, CA (US); Pedro PAZ, Hercules, CA (US); Phaik Lyn OH, Emeryville, CA (US); Patrick JONES, Alameda, CA (US); Matyas GORJANACZ, Berlin (DE)

(21) Appl. No.: 18/003,118

(22) PCT Filed: Jun. 25, 2021
(86) PCT No.: PCT/EP2021/067578

§ 371 Date: Dec. 22, 2022

Related U.S. Application Data
(60) Provisional application No. 62/705,434, filed on Jun. 26, 2020.
(60) Provisional application No. 62/705,608, filed on Jul. 7, 2020.

(30) Foreign Application Priority Data
Nov. 3, 2020 (EP) 20205426.8

(51) Int. Cl. C07K 16/28; A61K 47/68; C07K 14/715

(52) U.S. Cl. CPC C07K 16/2866; A61K 47/6849; C07K 14/7158; C07K 2319/03; C07K 2317/565

(57) ABSTRACT

The present invention relates to tools and methods for the generation of antibodies which specifically bind chemokine receptors, such as CC or CXC chemokine receptors. Provided are isolated sulfated polypeptides and conjugates thereof, which can be used for example as antigens or for off target panning to facilitate the generation of anti-human, anti-cynomolgus, and/or anti-mouse chemokine receptor antibodies, e.g. for the generation of antibodies with fully human CDRs and/or other favorable properties for therapeutic use. The present invention furthermore relates to antibodies and conjugates thereof which can be obtained by applying the aforementioned tools and methods. Provided are antibodies specifically binding to human, cynomolgus and/or murine CCR8 with favorable properties for therapeutic use, such as cross-reactive antibodies, fully human antibodies, low internalizing (including non-internalizing) antibodies, and antibodies efficiently inducing ADCC and/or ADCP in Treg cells. Also provided are medical uses of the inventive antibodies or conjugates and/or treatment methods comprising the administration of these antibodies to a patient or subject, either alone or in combination. Biomarkers, stratification methods and diagnostic methods are finally provided to predict or evaluate responsiveness to anti-CCR8 antibody monotherapy or combination therapy. The invention furthermore provides tools and methods for producing the foregoing antibodies, pharmaceutical compositions, diagnostic uses of the antibodies, and kits with instructions for use.

### SEQUENCE LISTING SUBMISSION

[0001] The Sequence Listing associated with this application is filed in electronic format via EFS-Web and hereby incorporated by reference into the specification in its entirety. The name of the text file containing the Sequence Listing is “172086_00220_ST25”. The size of the text file is 761,856 bytes, and the text file was created on Dec. 21, 2022.

### TECHNICAL FIELD

[0002] The present invention relates to tools and methods for the generation of antibodies which specifically bind chemokine receptors, such as CC or CXC chemokine receptors. Provided are isolated sulfated polypeptides and conjugates thereof, which can be used for example as antigens or for off target panning to facilitate the generation of anti-human, anti-cynomolgus, and/or anti-mouse chemokine receptor antibodies, e.g. for the generation of antibodies with fully human CDRs and/or other favorable properties for therapeutic use.

[0003] The present invention furthermore relates to antibodies and conjugates thereof which can be obtained by applying the aforementioned tools and methods. Provided are antibodies specifically binding to human, cynomolgus and/or murine CCR8 with favorable properties for therapeutic use, such as cross-reactive antibodies, fully human antibodies, low internalizing (including non-internalizing) antibodies, and antibodies efficiently inducing ADCC and/or ADCP in Treg cells.

[0004] Also provided are medical uses of the inventive antibodies or conjugates and/or treatment methods comprising the administration of these antibodies to a patient or subject, either alone or in combination. Biomarkers, stratification methods and diagnostic methods are finally provided to predict or evaluate responsiveness to anti-CCR8 antibody monotherapy or combination therapy.

[0005] The invention furthermore provides tools and methods for producing the foregoing antibodies, pharmaceutical compositions, diagnostic uses of the antibodies, and kits with instructions for use.

### Technical Problem

### Antibody Generation for CC and CXC Chemokine Receptors

[0006] CXC and CC chemokine-receptors are specific seven-transmembrane G-protein-coupled receptors that mediate cell migration in chemotactic gradients. Chemokine receptors are a challenging target class for antibody generation due to their inherent structural, biophysical and biological properties. There are multiple reasons for the difficulties to obtain optimal antibodies against chemokine receptors which shall be discussed in an exemplary fashion, with an emphasis on human CCR8.

[0007] Chemokine receptors are characterized by seven domains embedded in the cell membrane and therefore cannot be easily purified in their native confirmation. A purified, native chemokine receptor will have been removed from the membrane environment and is therefore likely to be conformationally compromised. These corrupted structures are typically not suitable for antibody generation, because antibodies are required to recognize the intact antigen as it is presented at the cell surface. Although some chemokine receptors, such as CXCR4 and CCR5, possess some inherent stability that allows for purification in mild detergents, this does not apply to most chemokine receptors (Hutchings, Catherine J., et al. “Opportunities for therapeutic antibodies directed at G-protein-coupled receptors.” Nature reviews Drug discovery 16.11 (2017): 787). This is emphasized by the fact, that until today, no X-ray crystal structure is available for CCR8 in the Protein Data Bank PDB (rcsb.org).

[0008] In consequence, solubilization for obtaining the required amounts of protein in the native conformation as well as correct orientation and folding for use as immunogen is difficult for chemokine receptors (cf. Klarenbeek, Alex, et al. “Targeting chemokines and chemokine receptors with antibodies.” Drug Discovery Today: Technologies 9.4 (2012): e237-e244).

[0009] A schematic representation of the overall structure of human CCR8 is shown in FIG. 2b. Of the 355 amino acids, residues 1-35 (N term), 94-107 (ECL1), 172-202 (ECL2) and 264-280 (ECL3) have been predicted as extracellular domains (uniprot.org). These extracellular domains are assumed to adopt a tertiary structure, stabilized by disulfide bonds. On average, less than 30% of a chemokine receptor is thus exposed at the cell surface. In consequence, chemokine receptors and particularly CCR8 are not easily accessible for antibody binding, as described also in WO200744756.

[0010] Furthermore, antibodies generated against peptides corresponding to extracellular domains of chemokine receptors often fail to recognize the intact receptor on the cell, possibly due to differences in secondary structure. In consequence, researchers in this field have had a low success rate in developing antibodies (Tschammer, Nuska, ed. Chemokines: chemokines and their receptors in drug discovery. Vol. 14. Springer, 2015, Chapter by J. E. Pease & R. Horuk, section 6, page 12, 2nd para).

[0011] Antibody generation to obtain anti-murine CCR8 antibodies seems slightly less difficult and conventional approaches such as the one described by Kremer and Márquez could be reproduced by the inventors (D'Ambrosio, Daniele, and Francesco Sinigaglia. Cell Migration in Inflammation and Immunity. Springer, 2004, Chapter by Kremer and Márquez p. 243-260). Murine and human CCR8 have a sequence identity of ˜70%, which is even lower for the extracellular domains, as described in more detail in example 2. Nevertheless, Kremer and Márquez discuss, that production of anti-mouse chemokine-receptor monoclonal antibodies is a demanding challenge and that antibodies against murine chemokine receptors are comparably scarce, despite the time that has passed since their amino acid sequences were first reported.

### Therapeutic Antibodies for CCR8 and Medical Uses Thereof

[0012] Despite the difficulties associated with their generation, antibodies targeting CC chemokine receptors have been suggested as promising therapeutic tools in various diseases, e.g. based on mechanistic insights in diseases with involvement of immune cells or in various cancer indications characterized by aberrant expression of chemokine receptors.

[0013] In 2004, Curiel et al. could show for CD4+CD25+FOXP3+ regulatory T cells (Treg cells or Tregs) in 104 individuals affected with ovarian carcinoma, that human tumor Treg cells suppress tumor-specific T cell immunity and contribute to growth of human tumors in vivo (Curiel, Tyler J., et al. “Specific recruitment of regulatory T cells in ovarian carcinoma fosters immune privilege and predicts reduced survival.” Nature medicine 10.9 (2004): 942-949).

[0014] Tumor cells and microenvironmental macrophages produce chemokines such as CCL22, which mediates trafficking of Treg cells to the tumor. High level of Tregs in the tumor microenvironment are not only associated with poor prognosis in many cancers, such as ovarian, breast, renal, and pancreatic cancer, but cause the suppression of the immune response against these cancers, e.g. by suppressing the action of the effector cells of the immune system. This specific recruitment of Treg cells thus represents a mechanism by which tumors may foster immune privilege. It has therefore been suggested to block Treg cell migration or function to defeat human cancer.

[0015] Being aware of the finding of Curiel, two independent teams around Plitas/Rudensky and De Simone/Abrignani/Pagani found that tumor infiltrating Treg cells are characterized by selective expression of CCR8. Indeed, selectivity of Treg cell depletion for the tumor infiltrating Tregs is important because systemic depletion of Treg cells may cause severe autoimmunity (Nishikawa, Hiroyoshi, and Shimon Sakaguchi. “Regulatory T cells in tumor immunity.” International journal of cancer 127.4 (2010): 759-767). The search for a specific Treg marker is complicated by the fact, that Treg cells show a molecular pattern which resembles effector lymphocytes, cf. example 11.2. Both peripheral Tregs and tumor-specific effector cells should not suffer from friendly fire during depletion of intra-tumoral Tregs, because peripheral Tregs are important to avoid autoimmunity while tumor-specific effector cells assist in keeping the tumor under control.

[0016] Based on these findings various teams have suggested to use CCR8 antibodies for selective depletion of tumor-infiltrating regulatory T cells. While some have presented data confirming tumor reduction in tumor models using anti-human CCR4 or anti-murine CCR8 antibodies, thereby confirming the mechanistic concept of Treg depletion, there is a need for therapeutic anti-human CCR8 antibodies, e.g. with superior properties in therapeutic applications.

### PRIOR ART

### 1.1 Antigens, Methods & Antibodies

[0017] The selection of an antigen in antibody generation is crucial for the properties of the resulting antibodies and may pose serious problems as discussed elsewhere herein for chemokine receptors such as CCR8. In some cases, antibodies have been obtained using whole cells as antigens, which were engineered for overexpression of chemokine receptors. At least for some chemokine receptors, these approaches seem to suffer from low numbers of resulting binders. Furthermore, antibodies obtained with these antigens are often characterized by off-target binding and low specificity for the chemokine receptor. If whole cells are used as antigens, immunodominant epitopes can mask other less antigenic ones, where the less antigenic would otherwise have the potential of generating the desired selective and specific antibodies. For CCR8, a successful “whole cell” approach has been described in WO2007044756 (ICOS). In brief, anti-CCR8 monoclonal antibodies were developed by immunizing Balb/c mice with irradiated cells transfected with CCR8 which had high levels of CCR8 expressed on the cell surface. Spleen cells from these mice were fused by standard methods to create hybridomas producing the antibodies. Positive pools were identified by FACS and were cloned by limiting dilution. Two of the antibodies, 433H and 459M, showed a specific reactivity to human CCR8 in immunohistochemistry. Antibody 433H is still available and can be purchased from BD.

[0018] Biolegend distributes clone L263G8, a purified mouse IgG2a anti-human CCR8 antibody which has been generated using human CCR8 transfectants as immunogen.

[0019] Kremer and Márquez have described the generation of monoclonal antibodies against murine CCR8 (D'Ambrosio, Daniele, and Francesco Sinigaglia. Cell Migration in Inflammation and Immunity. Springer, 2004, Chapter by Kremer and Márquez p. 243-260). In brief, Kremer and Márquez describe the use of peptides derived from the extracellular domains of murine CCR8 as immunogens, but do not suggest sulfation of the tyrosines. Indeed, the inventors found that the approach described by Kremer and Márquez can be successfully applied for antibodies recognizing murine CCR8 but has low success rates for antibodies recognizing human CCR8.

[0020] Schaerli et al. have generated anti-human CCR8 antibodies by immunizing rabbits with a human CCR8 peptide conjugate, corresponding to positions 1-34 of the N-terminal region of CCR8 coupled to either KLH or BSA, but again, do not suggest sulfation of the tyrosines (Schaerli, Patrick, et al. “A skin-selective homing mechanism for human immune surveillance T cells.” The Journal of experimental medicine 199.9 (2004): 1265-1275).

[0021] A murine monoclonal antibody binding to a 26-amino acid-containing peptide from the extracellular N-terminal portion of CCR8 has been described by Hague et al. (Hague, Nasreen S., et al. “The chemokine receptor CCR8 mediates human endothelial cell chemotaxis induced by 1-309 and Kaposi sarcoma herpesvirus-encoded vMIP-I and by lipoprotein (a)-stimulated endothelial cell conditioned medium.” Blood, The Journal of the American Society of Hematology 97.1 (2001): 39-45).

[0022] None of these methods for antibody generation uses an isolated sulfated polypeptide comprising the tyrosine rich domain (TRD) of a chemokine receptor or transmembrane protein as antigen. Use of an isolated sulfated polypeptide comprising the TRD of a chemokine receptor or transmembrane protein as antigen influences both, structural and functional features of the set of obtained antibodies, as discussed elsewhere herein.

[0023] In consequence, the antibodies according to the current invention are assumed to deviate in structure and function from the aforementioned prior art antibodies, e.g. at least in their affinity for sulfated CCR8, in their affinity for unsulfated CCR8, in their way and degree of modulating receptor signaling, in their internalization behavior, in cross reactivity, in clearance and pharmacokinetic behavior and finally in Treg depletion and/or efficacy for therapeutic applications.

[0024] Furthermore, the use of the antigens disclosed herein enabled the generation of fully human antibodies. In contrast, the discussed prior art antibodies for CCR8 are of non-human origin and deviate from some of the inventive antibodies at least because they do not comprise human CDRs.

### 1.2 Medical Uses and Mode of Action

[0025] Cancer immunotherapy involves the use of a subject's immune system to treat or prevent cancer. Immunotherapies typically exploit the fact that cancer cells often have subtly different molecules on their surface that can be detected by the immune system, the cancer antigens. Immunotherapy thus involves provocation of the immune system into attacking tumor cells via these cancer antigens. However, some cancers, such as solid tumors or hematological cancers can escape immune surveillance. For example, tumor infiltration by regulatory T cells (Treg cells or Tregs) and, more specifically, low ratio of effector T cells (Teff) to Tregs have been proposed as critical factors for hiding the tumor from the immune system (Smyth, Mark J., Shin Foong Ngiow, and Michele WL Teng. “Targeting regulatory T cells in tumor immunotherapy.” Immunology and cell biology 92.6 (2014): 473-474).

[0026] Foxp3-expressing regulatory T cells, which are indispensable for preventing autoimmunity, are known to effectively suppress tumor immunity. Treg cells abundantly infiltrate into tumor tissues, which is often associated with poor prognosis in cancer patients. Removal of Treg cells enhances anti-tumor immune responses but may also elicit autoimmunity. A key issue for tailoring Treg-targeting cancer immunotherapy resides in specific depletion of Treg cells infiltrating into tumor tissues without affecting tumor-reactive effector T cells, while suppressing autoimmunity.

[0027] Back in 2010 various groups had already investigated that Treg removal, e.g. by depletion with anti-CD25 antibodies, could improve antitumor immunity in mice. It had been shown that depletion of Tregs before the inoculation of tumor cells led to their efficient rejection while Treg depletion occurring simultaneously with or after tumor inoculation resulted in no tumor regression. It had furthermore been suggested, that this was due to the fact, that the administered depleting antibodies also removed CD25-expressing effector T cells, while CD25−Foxp3+ Tregs persisted (Klages, Katjana, et al. “Selective depletion of Foxp3+ regulatory T cells improves effective therapeutic vaccination against established melanoma.” Cancer research 70.20 (2010): 7788-7799).

[0028] In 2015, the afucosylated humanized anti-human CCR4 monoclonal antibody mogamulizumab (KW-0761) was evaluated in a clinical study for patients with CCR4-positive cancers (Kurose, Koji, et al. “Phase Ia study of FoxP3+ CD4 Treg depletion by infusion of a humanized anti-CCR4 antibody, KW-0761, in cancer patients.” Clinical Cancer Research 21.19 (2015): 4327-4336). CCR4 is expressed on regulatory T cells. Indeed, mogamulizumab efficiently depleted Treg cells and an augmentation or induction of specific immune responses to cancer antigens was observed. However, mogamulizumab targets both, peripheral as well as intra-tumoral Tregs and further effector cell polulations, thereby leading to immunological side effects such as skin rashes or Stevens Johnson syndrome.

[0029] Thus, although the great potential for Treg depletion in cancer therapies was obvious, a concept to selectively target the Tregs and to avoid overt autoimmunity was missing. This was changed with the work of two teams around Plitas/Rudensky and De Simone/Abrignani/Pagani in 2015 and 2016.

[0030] Plitas et al. demonstrated that CCR8 is selectively expressed by human breast cancer infiltrating Treg cells and immediately concluded that targeting CCR8 represents a promising immunotherapeutic approach for the treatment of patients with breast cancer and further tumors (Plitas, G., et al. “Abstract P4-04-11: Preferential expression of the chemokine receptor 8 (CCR8) on regulatory T cells (Treg) infiltrating human breast cancers represents a novel immunotherapeutic target.” (2016): P4-04; Plitas, George, et al. “Regulatory T cells exhibit distinct features in human breast cancer.” Immunity 45.5 (2016): 1122-1134; U.S. Ser. No. 10/087,259).

[0031] Only shortly after publication of the initial work of Plitas et al., De Simone et al. published an analysis on the transcriptional landscape of tumor infiltrating T regulatory cells and found that tumor-infiltrating Treg cells were highly immune suppressive and expressed CCR8 on their cell surface as a specific signature molecule (De Simone, Marco, et al. “Transcriptional landscape of human tissue lymphocytes unveils uniqueness of tumor-infiltrating T regulatory cells.” Immunity 45.5 (2016): 1135-1147, WO2017198631). The authors described that CCR8 correlated with poor prognosis and concluded that CCR8 could be an interesting therapeutic target to inhibit Treg cells trafficking to tumor sites, without disturbing recruitment of other effector T cells that do not express CCR8.

[0032] WO2018112032 and WO2018112033 describe methods of decreasing the number or activity of tumor infiltrating T regulatory cells (TITR) in a tumor comprising administering an agent that induces cytotoxicity in cells that express a product of a gene, e.g. CCR8.

[0033] WO2018112033 and EP3431105 describe a molecule which can modulate the expression and/or function of at least one marker that is selectively deregulated in tumor-infiltrating regulatory T cells for use in the prevention and/or treatment of this tumor.

[0034] WO2018181425 relates to an antibody against CCR8 having ADCC activity, for use in a method of treating a cancer, wherein the antibody against CCR8 is a CCR8-neutralizing antibody. WO2018181425 does not disclose specific antibody sequences but refers to rat anti-mouse CCR8 clone SA214G2 distributed by BioLegend under Cat. No. 150302. This antibody was used as a tool antibody to recapitulate the previously described anti-tumorigenic effects of Treg depletion in mice.

[0035] According to the current invention, a method is provided which facilitates the generation of anti-CCR8 antibodies and yields antibodies having superior properties for therapeutic uses. The antibodies according to the current invention were compared with the prior art antibodies and were found to deviate in structure, function and therapeutic efficacy, as discussed elsewhere herein.

### Solution to Problem

### 1.1 Antibody Generation for CC and CXC Chemokine Receptors

[0036] Because prior art approaches to generate antibodies for CC chemokine receptors suffer from low success rates, and resulting antibodies often show a poor performance (cf. e.g. example 3), the inventors developed a novel method to generate antibodies for chemokine receptors in general and, in particular, to generate anti-CCR8 antibodies.

[0037] The use of a specifically modified isolated polypeptide as antigen for the selection of human anti-human CCR8 antibodies solved the problem to provide an improved method for antibody generation against CC and CXC chemokine receptors, such that e.g. fully human anti-CCR8 antibodies could be obtained for the first time, cf. example 6. In more detail, a polypeptide comprising the tyrosine rich domain of human CCR8, optionally including the LID domain, was modified by introduction of sulfate modifications at specific positions in order to form the antigen, cf. example 4, Table 4.1. A phage display approach was optionally used together with this specifically modified antigen to select fully human anti-human CCR8 antibodies. In the alternative, the sulfated antigens can be used in various further methods, e.g. in conventional immunization approaches.

[0038] The obtained antibodies showed an excellent binding profile for the sulfated antigen and the biological target expressed under physiological conditions, cf. examples 6, 10.1.1, but a comparably low or no affinity for the unmodified antigen, cf example 10.1.2, example 10.1.3, demonstrating that the sulfated residues were indeed crucial for antigen antibody binding. The inventive antibodies furthermore showed an excellent and also specific binding on cell lines engineered to express human, cynomolgus or murine CCR8, and also on activated human Tregs, cf. example 10.1.1.

[0039] Out of the six CDR loops of an antibody, the H3 loop shows the greatest structural diversity and is located in the center of the binding site. It also gains the most mutations through affinity maturation and has on average the largest number of contacts with the antigen. It therefore plays a crucial role in antigen binding. Upon analysis of the specific structure of the antibodies obtained with the method according to the current invention, it was surprisingly found that the composition of the HCDR3 was structurally different from usual human HCDR3 domains, cf. example 9. In particular, the HCDR3 domains of the antibodies with the therapeutically most beneficial properties and specific binding to CCR8 were characterized by an average frequency of ˜21% tyrosine residues and an average histidine content of ˜10%, emphasizing a beneficial impact of these residues on the recognition of the specific sulfated antigen (cf. Table 9.2). Without being bound by theory, the inventors believe that these structural features translate into certain functional characteristics which make the obtained antibodies more suitable for therapeutic applications. For example, and in contrast to the tested prior art antibodies, several antibodies according to the invention block G protein dependent signaling, cf. example 10.4.3, but do not impact G protein independent pathways, cf. examples 10.4, 10.4.1, 10.4.2, and do not substantially internalize into cells with endogenous expression of the target chemokine receptor, cf. example 10.5. In addition, particularly preferred antibodies according to the current invention were specific for the target receptor and target cells, cf. example 10.2, 11, and are especially suitable/showed superior properties in methods of treatment for cancer, cf. examples 12 ff. Furthermore, use of these synthetic polypeptides either as antigens or for off target panning facilitated or enabled the generation of cross-reactive antibodies, such as antibodies specifically binding to human CCR8 and/or cynomolgus CCR8, cf. example 10.1.1.

### 1.2 Provision of Therapeutic Antibodies Specifically Binding Chemokine Receptors

### 1.2.1 Obtaining Chemokine Receptor Antibodies with Human CDRs

[0040] While humanization of antibodies with murine CDRs may improve the immunogenicity of an antibody, residual immunogenicity resides in the CDR regions (Harding, Fiona A., et al. “The immunogenicity of humanized and fully human antibodies: residual immunogenicity resides in the CDR regions.” MAbs. Vol. 2. No. 3. Taylor & Francis, 2010). Antibodies comprising human CDRs are thus assumed to have a superior suitability as therapeutic agents for humans compared with antibodies comprising CDRs from other species.

[0041] For example, antibodies with human CDRs can be produced via phage display technologies or using transgenic animals capable of generating fully human antibodies. However, it is not always trivial to obtain fully human antibodies. While, in theory, the diversity of HCDR3 regions is almost unlimited, in practice the generation of the antibody repertoire diversity appears to be carefully regulated by multiple mechanisms, which yield an in vivo repertoire that is restricted in its diversity and constrained in its range of antigen-binding sites. This is also the case for human phage display libraries, which are often designed to reflect the in vivo repertoire. Thus, in some cases, the structural requirements of a “complicated” antigen may be fulfilled by rodent CDRs, while the same structure cannot be readily recognized by human CDRs. Based on the observation that tyrosine representation is on average approximately 50% lower in human HCDR3 than in murine HCDR3, it can be assumed that it is clearly more challenging to find a human anti-human antibody in cases, where the unique binding abilities of tyrosine and histidine are required to enable the target binding. Indeed, the inventors are not aware of fully human anti-human CCR8 prior art antibodies. According to the current invention there are provided CCR8 antibodies comprising human derived CDRs, and also fully human antibodies, cf. examples 6, 7, 8.

### 1.2.2 Obtaining Cross Reactive Chemokine Receptor Antibodies

[0042] Cross reactive anti-chemokine receptor antibodies such as cross reactive anti-CCR8 antibodies are advantageous for the development of a therapeutic antibody, because they can be used in non-human animal models to characterize the therapeutic agents with regards to pharmacological data and safety, before the antibodies are administered to humans. However, cross reactive antibodies e.g. with similar binding behavior in two species are difficult to generate and cannot be easily affinity maturated, e.g. because the extracellular parts of chemokine receptors such as CCR8 have a low homology between species (see example 2). According to the current invention, cross reactive antibodies for CCR8 can be generated in particular by using small sulfated tyrosine comprising motifs which have a higher conservation between species, such that cross reactive antibodies binding a chemokine receptor such as CCR8 from two or more species, e.g. with affinities in the same order of magnitude can be obtained in an easy and convenient way, cf. examples 6, 7, 10.1.1.

### 1.2.3 Obtaining Chemokine Receptor Antibodies for Therapy

[0043] To induce the killing of cells expressing a target chemokine receptor or CCR8, multiple modes of action can be envisioned. One mode of action is the conjugation of an antibody targeting the chemokine receptor or CCR8 to a drug in the form of an antibody drug conjugate (ADC). Other possible modes of action are induction of antibody-dependent cellular cytotoxicity (ADCC), antibody-dependent cellular phagocytosis (ADCP) and/or complement-dependent cytotoxicity (CDC). For ADCC, CDC and ADCP, a two-step mechanism is involved: On the one hand, the antibody or fragment is required to effectively bind the target cell, e.g. the Treg via CCR8, on the other hand, the FC part of the antibody (or an alternative binding moiety which can be conjugated to the antibody or fragment as described elsewhere herein) has to bind to an effector cell, which will then mediate the killing of the target cell. For ADCP, binding to macrophages as effector cells typically occurs via the interaction of the antibodies FC part with FcγRIIa (CD32a) expressed by macrophages. In contrast, ADCC is mediated via interaction of the antibody or fragment with FcγRIIIa. In humans, FcγRIII exists in two different forms: FcγRIIIa (CD16a) and FcγRIIIb (CD16b). While FcγRIIIa is expressed on mast cells, macrophages, and natural killer cells as a transmembrane receptor, FcγRIIIb is only expressed on neutrophils. These receptors bind to the Fc portion of IgG antibodies, which then activates antibody-dependent cell-mediated cytotoxicity (ADCC) mediated by the human effector cells.

### 1.2.4 Obtaining Low Internalizing (Including Non-Internalizing) Chemokine Receptor Antibodies

[0044] When the inventors analyzed known anti-human CCR8 prior art antibodies, they found that these antibodies readily internalized into a cell with endogenous target expression but did not reside on the cell surface for extended periods of time. The internalization behavior of an antibody does not only influence its clearance and pharmacological behavior but also its suitability for a specific mode of action for therapeutic uses.

[0045] While high internalization is desirable for the generation of certain antibody drug conjugates, it is undesirable for ADCC induced depletion of tumor cells or Treg cells. In more detail, an antibody drug conjugate is required to transport the drug into the cell to achieve an efficient and specific depletion of the target cell. In contrast, the ADCC mode of action requires the exposure of the antibody and its Fc domain at the outside of the target cell, where the immune effector cells can bind the FC domain for the lysis of the target cell. A low or even absent internalization rate thereby increases the time of effect for an ADCC/ADCP inducing antibody.

[0046] Upon characterization of the antibodies obtained with the novel method, the inventors surprisingly found, that several of the antibodies according to the current invention showed a particularly low or even absent internalization profile in cells with endogenous expression levels of CCR8, cf. example 10.5, while the prior art antibodies recognizing the same target had a higher internalization rate. For example, prior art antibodies 433H and L263G8 readily internalized into the targeted cell and did not reside on the cell surface for extended periods of time. Due to their low internalization properties, some of the antibodies according to the current invention are thus particularly useful in an ADCC, ADCP, CDC or a mixed approach, such as a combined ADCC/ADCP approach.

[0047] Typically, the selection of a target is an important factor which strongly influences the internalization of an antibody into a cell. According to Islam SA et al, CCL1 ligand binding induces Ca2+ flux and rapid receptor internalization of CCR8 (Islam, Sabina A., et al. “Identification of human CCR8 as a CCL18 receptorCCR8 is a CCL18 receptor.” The Journal of experimental medicine 210.10 (2013): 1889-1898). The inventors found it surprising that the antibody itself was able to influence the internalization properties in such a substantial degree. However, when they characterized the ability of the inventive antibodies to modulate G protein independent signaling pathways of their target chemokine receptor, they found that all tested prior art antibodies not only blocked G protein dependent signaling, but also modulated G protein independent signaling, cf. examples 10.4 ff.. G protein independent signaling has been previously linked to internalization behavior, cf. Fox, James M., et al. “Structure/function relationships of CCR8 agonists and antagonists: Amino-terminal extension of CCL1 by a single amino acid generates a partial agonist.” Journal of Biological Chemistry 281.48 (2006): 36652-36661.

### 1.2.5 Obtaining Chemokine Receptor Antibodies Modulating Target Receptor Signaling

[0048] There are multiple different ways how an antibody can modulate a chemokine receptor. For example, an antibody can

a) block G-protein independent signaling,
b) block G-protein dependent signaling,
c) block G-protein dependent and G-protein independent signaling,
d) increase G-protein independent signaling,
e) increase G-protein dependent signaling,
f) increase G-protein dependent and G-protein independent signaling.

[0049] Without being bound by theory, the inventors hypothesize that the sulfated TRD of the respective chemokine receptor may be relevant for the ligand induced signaling of the chemokine receptor. Interestingly, most of the inventive antibodies efficiently blocked ligand induced G-protein dependent signaling but did not influence G protein independent signaling, cf. examples 10.4 ff. In contrast, all prior art antibodies likewise blocked ligand induced G-protein dependent signaling but agonized G-protein independent signaling. Without being bound by theory, these differences may contribute to the differences in internalization behavior.

[0050] Avoiding induction of G protein independent signaling by a therapeutic antibody might also be advantageous, because unspecific signaling may result in uncontrollable downstream effects such as an increased cell proliferation, cf. Hutchings, Catherine J., et al. (2017); Webb, David R., et al. “Opportunities for functional selectivity in GPCR antibodies.” Biochemical pharmacology 85.2 (2013): 147-152; Fox, James M., et al. (2006).

### 1.2.6 Obtaining ADCC/ADCP Inducing Chemokine Receptor Antibodies

[0051] The antibodies according to the current invention are characterized by a superior induction of ADCC and ADCP, as shown e.g. in example 10.3.3, 10.3.4. In some preferred embodiments, the antibodies were engineered by elimination of the fucose at N297 (afucosylation) to obtain the high ADCC rates, cf. examples 10.3.1. Interestingly, many of the inventive anti-CCR8 antibodies seemed to induce target cell depletion via a combined mode of action using both mechanisms, i.e. ADCC and ADCP.

### 1.3 Methods for Treatment

[0052] While it has been suggested by several research groups to use antibodies binding CCR8 in methods of treatment based on mechanistic insights, the way to the provision of antibodies with optimal therapeutic properties has been tedious. By providing a method for antibody generation according to the current invention, antibodies for chemokine receptors with superior therapeutic properties can now be easily obtained. According to the current invention, various sequence defined antibodies with favorable properties are disclosed, which can be used in a method of treatment, e.g. as part of a conjugate, in an ADCC based approach, in an ADCP based approach, in a CDC based approach, or in a mixed ADCC/ADCP based approach. Examples 12 ff. show remarkable efficacies in Treg depletion, Overall Response Rate and Tumor-to-Control ratio for surrogate antibodies generated with a method according to the current invention.

### 1.4 Combination Treatment

[0053] While remarkable response rates were obtained in monotherapy with the inventive anti-CCR8 antibodies, it was surprisingly found that the therapeutic benefit could be further increased by combining the antibodies with immune checkpoint inhibitors, with further targeted therapies, and even with unspecific chemotherapeutics or radiation therapy. These combination treatments were particularly beneficial in challenging tumor models. In particular, a specific combination treatment scheme was found effective, where the second therapeutic agent or therapy was administered only after the anti-CCR8 antibody had caused substantial Treg depletion (see examples 12.6 ff.). Furthermore, it was observed that even a single anti-CCR8 antibody treatment showed a substantial therapeutic effect (see example 12.4.2).

### 1.5 Stratification Schemes and Diagnostic Methods

[0054] When evaluating the responsiveness of different syngeneic mouse models to anti-CCR8 antibody treatment, the inventors could identify several mechanisms, biomarkers and biomarker combinations that were predictive for treatment efficacy and overall response. For example, it was surprisingly found that the degree of responsiveness to immune checkpoint inhibitors such as PD-1, PD-L1 or CTLA4 antibodies was also predictive for the response to anti-CCR8 antibody treatment. Because PD-L1 expression is sometimes used as a surrogate marker to predict the responsiveness for immune checkpoint inhibitors, the inventors evaluated if PD-L1 could also be used to predict the responsiveness for anti-CCR8 antibody treatment. This hypothesis could finally be confirmed by correlation data, see example 12.7.1. In a further attempt to identify those subjects that would most likely benefit from anti-CCR8 treatment, further marker genes, such as immune cell and Treg markers were evaluated as biomarkers (see examples 12.1.2, 12.7.2, 12.8).

### BRIEF DESCRIPTION OF THE DRAWINGS

[0055] FIG. 1: Alignment of human CC chemokine receptors and CXC chemokine receptors. The following sequences are shown, ordered from top to bottom: hCCR1 (SEQ ID NO:109), hCCR2 (SEQ ID NO:112), hCCR3 (SEQ ID NO:115), hCCR4 (SEQ ID NO:118), hCCR5 (SEQ ID NO:121), hCCR6 (SEQ ID NO:124), hCCR7 (SEQ ID NO:127), hCCR8 (SEQ ID NO:130), hCCR9 (SEQ ID NO:133), hCCR10 (SEQ ID NO: 136), hCXCR1 (SEQ ID NO:139), hCXCR2 (SEQ ID NO:142), hCXCR3 (SEQ ID NO:145), hCXCR4 (SEQ ID NO:148), hCXCR5 (SEQ ID NO:151), and hCXCR6 (SEQ ID NO:154).

[0056] FIG. 2A: Human CCR8 (SEQ ID NO:130), cynomolgus CCR8 (SEQ ID NO:131), and murine CCR8 (SEQ ID NO:132) sequences were retrieved from Uniprot and aligned with Clustal Omega.

[0057] FIG. 2B: Schematic representation of CCR8 receptor structure which contains 7 transmembrane domains (black boxes), three extracellular loops (ECL), several disulfide bridges (SS), and an intracellular C-terminal part as well as the extracellular N-terminal domain composed of the “LID” domain and the tyrosine rich domain (TRD).

[0058] FIG. 3: Evaluation of three prior art antibodies by FACS staining in CCR8 positive target cells. None of the shown prior art antibodies showed a shift in FACS staining compared with the isotype control. hAP-0068 and MAB1429-100 were tested on 293T cells stably transfected with human CCR8 while MAB8324 was tested on BW5147.3 cells expressing murine CCR8.

[0059] FIG. 4: Panning strategy for lead finding: Two major strategies for selections on sulfated peptides are depicted. In all strategies, prior to each round of selection a depletion step on a relevant or an irrelevant biotinylated protein was included.

[0060] FIG. 5: Panning strategy to obtain anti-murine CCR8 antibodies: The main strategy for selection based on a mix of sulfated/non-sulfated peptides is depicted. Prior to each round of selection, a depletion step on a relevant biotinylated protein was performed.

[0061] FIG. 6: FACS data of inventive antibodies binding to CHO cells expressing human CCR8.

[0062] FIG. 7: FACS data of inventive antibodies binding to CHO cells expressing cynomolgus CCR8.

[0063] FIG. 8: FACS data of candidates binding to activated human Tregs (donor 1). Right side: Percent of CCR8 expression determined using BioLegend Clone L263G8.

[0064] FIG. 9: FACS data of inventive antibodies TPP-21181 and TPP-23411 binding to CHO cells expressing human CCR8.

[0065] FIG. 10: FACS data of inventive antibodies TPP-21181 and TPP-23411 binding to CHO cells expressing cynomolgus CCR8.

[0066] FIG. 11: Binding of TPP-21360, L263G8, and 433H to CHO cells expressing human CCR8.

[0067] FIG. 12: Binding of TPP-21360, L263G8, and 433H to CHO cells expressing cynomolgus CCR8. Prior art antibodies showed only very low overall binding to cynomolgus CCR8 (low saturation). Nevertheless, EC50 values could be determined for each antibody.

[0068] FIG. 13: Activated human Treg staining with inventive antibody TPP-23411, gating strategy. CD4+ and CD25+ sorted cells from peripheral blood mononuclear cells (PBMC) were activated with anti-CD3 and anti-CD28 beads (Treg expansion kit, Miltenyi). Middle pane: Cells that are CD4+ CD25+CD127low and Foxp3+. Lower panel: CCR8 expression on Tregs after staining with TPP-23411 or L263G8.

[0069] FIG. 14: Binding of TPP-21360 to CHO cells with mock transfectants. No unspecific binding was observed.

[0070] FIG. 15: Off target binding in HEK cells transiently transfected with human CCR1. Most inventive candidates showed only low off target binding for CCR1.

[0071] FIG. 16: Off target binding in HEK cells transiently transfected with human CCR4. Most inventive candidates showed only low off target binding for CCR4.

[0072] FIG. 17: Staining for CCR8 expression on different immune cell populations from healthy donor PBMCs (CD4+ T cells, CD8+ T cells, B cells as marked by CD19+ expression, Myeloid cells as marked by CD11b+ expression, CD4 T cells activated with anti-CD3 and anti-CD28 beads for 4 days, CD8+ T cells activated with anti-CD3 and anti-CD28 beads for 4 days).

[0073] FIG. 18: CCR8 is upregulated on human Tregs after activation. After activation, the percentage of CCR8+ cells increased significantly in CD4+CD25+ purified cells with increased MFI while % of CCR8+ cells increased slightly in PBMC population. Anti-CCR8 antibody from BioLegend was used for these experiments. N=4 donors.

[0074] FIG. 19: ADCC induced by wild type or afucosylated inventive antibodies TPP-19546, TPP-21360 or TPP-23411 in HEK cells expressing human CCR8 as target cells. Isotype control: TPP-9808.

[0075] FIG. 20: Left: Percent CCR8+ expression on day 3 for activated human Tregs as target cells. Right: ADCC induced by wild type or afucosylated inventive antibody TPP-21360, TPP-23411 in activated human Tregs as target cells. Isotype control: TPP-9808. Results were reproducible in different donors (data not shown).

[0076] FIG. 21: Protocol for ADCP assay.

[0077] FIG. 22: ADCP assay for wild type and afucosylated versions of inventive antibodies shows induction of phagocytosis in HEK cells expressing human CCR8 as target cells with in vitro differentiated M2c macrophages as effector cells. Wild type and afucosylated versions of inventive antibodies TPP-19546, TPP-21360 and TPP-23411 induced ADCP. TPP-9808 is the isotype control. Mogamulizumab is a marketed anti-CCR4 antibody.

[0078] FIG. 23: ADCP assay for wild type and afucosylated versions of inventive antibodies TPP-21360, and TPP-23411 shows induction of phagocytosis in activated human Tregs from two different donors as target cells (upper or lower panel) and M2c macrophages as effector cells. TPP-9808 is the isotype control.

[0079] FIG. 24: ADCP assay for wild type and afucosylated versions of inventive antibodies TPP-21360, and TPP-23411 shows induction of phagocytosis in activated human Tregs as target cells and M1 macrophages as effector cells.

[0080] FIG. 25: Activation of β-arrestin signaling measured with the DiscoverX assay for CCL1, TPP-23411, L263G8, or 433H on CHO cells co-expressing human CCR8 tagged with ProLink and EA. As expected, CCR8 ligand CCL1 (human) induces β-arrestin signaling. An extra timepoint was analyzed for TPP-23411 to ensure that no β-arrestin activation happened at earlier time points. None of the analyzed antibodies induced β-arrestin signaling activation.

[0081] FIG. 26: Evaluation of blocking of CCL1 induced β-arrestin signaling by TP-23411, L263G8, or 433H, measured with the DiscoverX assay. CCL1 was used at its EC80 (20 ng/ml). Prior art antibodies L263G8, and 433H both blocked β-arrestin signaling induced by CCL1 at low antibody concentration, while inventive antibody TPP-23411 showed no effect at these concentrations. β-arrestin signaling has been suggested to play a role in internalization.

[0082] FIG. 27: Phospho Erk1/2 ELISA assay. CHO cells expressing human CCR8 were treated with CCL1, TPP-23411, Biolegend L263G8 or BD antibody 433H and cell lysates were collected at the respective time point.

[0083] FIG. 28: Phospho Erk1/2 ELISA assay. Activated human Treg cells expressing CCR8 were treated with CCL1, TPP-23411, Biolegend L263G8 or BD antibody 433H, and cell lysates were collected at the respective time point. Prior art antibodies Biolegend L263G8 and BD antibody 433H both induced a significant increase of phosphorylated Erk 1/2 levels, e.g. after 15 minutes in activated human Tregs, while this was not the case for inventive antibody.

[0084] FIG. 29: Phospho AKT ELISA assay. CHO cells expressing human CCR8 were treated with CCL1, TPP-23411, Biolegend L263G8 or BD antibody 433H and cell lysates were collected at the respective time point.

[0085] FIG. 30: Phospho AKT ELISA assay. Activated human Treg cells expressing CCR8 were treated with CCL1, TPP-23411, Biolegend L263G8 or BD antibody 433H, and cell lysates were collected at the respective time point. Prior art antibodies Biolegend L263G8 and BD 433H both induced a significant increase of phospho AKT levels in activated human Tregs, e.g. after 15 minutes, while this was not the case for inventive antibodies.

[0086] FIG. 31A: Internalization studies. FACS analysis of commercial anti-human CCR8 antibodies Biolegend L263G8 or BD antibody 433H with endogenously CCR8-expressing cell line HuT78

[0087] FIG. 31B: Internalization studies of commercial anti-human CCR8 antibodies with endogenously CCR8-expressing cell line HuT78 based on cytoplasmic-intensity spots. TPP-5657: Isotype control.

[0088] FIG. 32A: Internalization studies. FACS analysis of commercial anti-murine CCR8 antibody SA214G2 with murine endogenously CCR8-expressing cell line BW5147.3.

[0089] FIG. 32B: Internalization study of commercial anti-murine CCR8 antibody SA214G2 with murine endogenously CCR8-expressing cell line BW5147.3. The anti-murine CCR8 prior art antibody SA214G2 elicits internalization.

[0090] FIG. 33A: Internalization study of inventive anti-human CCR8 antibodies TPP-21360 and TPP-23411 with endogenously CCR8-expressing cell line TALL-1. Both antibodies reveal identical internalization behavior, comparable with the isotype control TPP-5657.

[0091] FIG. 33B: Internalization study of inventive anti-human CCR8 antibodies TPP-21360 and TPP-23411 with endogenously CCR8-expressing cell line HuT78. Both antibodies reveal identical internalization behavior, comparable with the isotype control TPP-5657.

[0092] FIG. 34A: FACS analysis of inventive anti-human CCR8 antibodies TPP-21360 and TPP-23411 with endogenously CCR8-expressing cell line[[s]] TALL-1. Both antibodies reveal same binding potency to the cell line.

[0093] FIG. 34B: FACS analysis of inventive anti-human CCR8 antibodies TPP-21360 and TPP-23411 with endogenously CCR8-expressing cell line HuT78 (b). Both antibodies reveal same binding potency to the cell line.

[0094] FIG. 35: CCR8 mRNA expression across 11642 samples representing a comprehensive set of human tissues and cell types as measured by affymetrix probe 208059_at. All samples were co-normalized using the refRMA method (Katz, Simon, et al. “A summarization approach for Affymetrix GeneChip data using a reference training set from a large, biologically diverse database.” BMC bioinformatics 7.1 (2006): 1-11). Dark grey box coloring indicates that the median sample in the corresponding group has a probe signal intensity significantly above background noise (as estimated by affymetrix′ MASS algorithm, cf. Pepper, Stuart D., et al. “The utility of MASS expression summary and detection call algorithms.” BMC bioinformatics 8.1 (2007): 1-12). Median CCR8 expression significantly above background noise is only observed in activated regulatory T cells as well as tumor infiltrating lymphocytes. Groups are sorted based on decreasing mean expression.

[0095] FIG. 36: CCR8 mRNA expression, as measured by RNA-seq, across 50 different TCGA (www.cancer.gov/tcga) tumor indications (dark grey boxes), corresponding normal tissues (white boxes), as well as across the CCLE tumor cell line panel (Barretina, Jordi, et al. “The Cancer Cell Line Encyclopedia enables predictive modelling of anticancer drug sensitivity.” Nature 483.7391 (2012): 603-607) also grouped by tumor indications (light grey boxes). Groups are sorted based on mean expression. Indications with highest CCR8 expression are breast cancer, lung adenocarcinoma (ADC) and squamous cell carcinoma (SCC), head and neck malignancies, as well as esophageal tumors. In all indications except pancreatic adenocarcinoma and melanoma, expression appears higher in the tumor compared to the corresponding normal tissue. Little to no expression is observed in corresponding tumor cell lines of epithelial origin indicating that CCR8 is not expressed by tumor cells but exclusively by tumor infiltrating T cells. In principle, each tumor indication with CCR8+ Treg cell infiltration is supposed to be eligible for anti-CCR8 antibody treatment.

[0096] FIG. 37: Immunohistochemistry with staining of Treg markers FOXP3 and CCR8 (clone 433H) in human Non-small-cell lung cancer tissue (NSCLC) or human melanoma tissue.

[0097] FIG. 38: Staining of FACS sorted T cell populations based on CCR4, CCR8, OX40, GITR, and CD25. Only CCR8 is specific for activated Tregs. OX40, GITR, and CD25 are significantly expressed on stimulated CD8+ Teff cells and CD4+ T cells (CD4+CD25+Foxp3−). Dark grey: isotype control, light grey: target staining.

[0098] FIG. 39: Expression of CCR8 across different T cell subsets extracted from different tumor entities as measured by single cell RNA-seq. For these tumors, CCR8 mRNA expression is largely restricted to regulatory T cells (light grey boxes) residing in tumor tissue while largely being absent in regulatory T cells from normal tissues as well as from CD4 helper T and CD8 cytotoxic T cells (medium and dark gray boxes, respectively). Upper panel: Colorectal tumor tissue (Tumor) or adjacent normal tissue (Normal). Middle panel: Liver cancer tissue (Tumor) or adjacent normal tissue (Normal). Lower panel: Lung cancer tissue (Tumor) or adjacent normal lung tissue and peripheral blood (Normal). Sample sizes, N, indicate the number of cells in each category. Cells were designated as regulatory T cells, T helper cells, or cytotoxic T cells based on expression of marker genes FOXP3, CD4 (but no FOXP3), and CD8A/B, respectively.

[0099] FIG. 40: Treg, macrophage, T cell or tumor cell populations from NSCLC, CRC (colorectal cancer) or RCC (renal carcinoma) were stained with anti-CCR8 antibody or isotype control and were analyzed by flow cytometry. X axis: Log shift up to 10⁵; Y axis: Intensity normalized to mode. Lighter grey: isotype control. Darker grey: CCR8. Specific CCR8 expression on intra-tumoral human Tregs is indicated by arrows.

[0100] FIG. 41: CT26 tumor growth after treatment with different doses of anti-CCR8 antibodies or anti-PDL1 antibody.

[0101] FIG. 42: Spider plots of CT26 tumor bearing mice after treatment with different doses of anti-CCR8 antibodies, anti-PDL1 antibody or isotype controls.

[0102] FIG. 43: FACS analysis of intra-tumoral immune cells 24 hours after second antibody treatment. Analysis of intra-tumoral Tregs. Anti-CCR8 antibody TPP15285 leads to an average decrease of intra-tumoral Tregs to 13%, 33%, or 47% of the Tregs in the isotype control, for 10 mg/kg, 1 mg/kg or 0.1 mg/kg, respectively. Anti-CCR8 antibody TPP15286 leads to an average decrease of intra-tumoral Tregs to 10%, 9% or 14% of the Tregs in the isotype control, for 10 mg/kg, 1 mg/kg or 0.1 mg/kg, respectively, cf. Table 12.2.1. Analysis of intra-tumoral CD8+ T cells. Mean increase in % of isotype control is shown in Table 12.2.1. Analysis of ratio of CD8+ T cells to Treg cells. Anti-CCR8 antibody TPP15286 leads to an average increase of the CD8+ cell to Treg cell ratio of 44 (10 mg/kg), 87 (1 mg/kg) or 68 (0.1 mg/kg). Anti-CCR8 antibody TPP15285 leads to an average increase of the CD8+ cell to Treg cell ratio of 64 (10 mg/kg), 16 (1 mg/kg) or 10 (0.1 mg/kg). Analysis of ratio of CD4+ cony T cells to Treg cells.

[0103] FIG. 44: CT26 tumor growth after treatment with glycosylated (TPP-14095, TPP-14099, TPP-15285, TPP-15286) or aglycosylated (TPP-18208, TPP-18209) anti-CCR8 antibodies. Aglycosylation largely abolished the anti-tumor effect.

[0104] FIG. 45: Spider plots of CT26 tumor bearing mice after treatment with glycosylated (TPP-14095, TPP-14099, TPP-15285, TPP-15286) or aglycosylated (TPP-18208, TPP-18209) anti-CCR8 antibodies. Aglycosylation largely abolished the anti-tumor effect, suggesting an ADCC/ADCP dependent mechanism of anti-tumor efficacy.

[0105] FIG. 46: FACS analysis of immune cells 24 hours after second antibody treatment. Absolute numbers of intra-tumoral CD45+ cells. Absolute numbers of intra-tumoral CD45+CD8+ T cells. Absolute numbers of intra-tumoral CD8+ T cells. Absolute numbers of intra-tumoral CD4+ cony cells. Analysis of intra-tumoral Treg depletion by flow cytometry showing absolute cell numbers. Average percentage of residual Tregs relative to the respective isotype control after antibody administration was 15.6% for TPP-14095, 28.2% for TPP-14099, 8.7% for TPP-15285 and 36.5% for TPP-15286. For the aglycosylated antibodies no reduction in Tregs was observed. % CD8+ T cells of intra-tumoral CD45+ cells. CD8+ T cells:Treg ratio. CD4+ conv:Treg ratio. Percentage Treg cells of CD4+ T cells. Absolute numbers of intra-tumoral 4-1BB+ Treg cells. Absolute numbers of intra-tumoral 4-1BB+ CD4+ cony cells.

[0106] FIG. 47: EMT6 tumor growth after treatment with different doses of anti-CCR8 antibody TPP-15285. Significance was determined by 1-Way ANOVA plus Sidak's post-test after log transform.

[0107] FIG. 48: EMT6 tumor growth at day 19 after treatment with different doses of anti-CCR8 antibody TPP-15285 or anti-CTLA4 antibody.

[0108] FIG. 49: Spider plots of EMT6-tumor bearing mice after treatment with different doses of anti-CCR8 antibody TPP-15285 or anti-CTLA4 antibody.

[0109] FIG. 50: FACS analysis of immune cells of EMT6-tumor bearing mice after treatment with different doses of CCR8-antibody TPP-15285 or anti-CTLA4 antibody, 24 hours after second treatment or at the end of the study. Absolute numbers of intra-tumoral Treg cells. Significant differences were observed e.g. for 10 mg/kg of anti-CCR8 antibody at both timepoints. CD8 positive cells to Treg ratio. CD4+ cony cells to Treg ratio. Percentage Treg cells of CD4+ T cells.

[0110] FIG. 51: FACS analysis of immune cells of EMT6-tumor bearing mice after treatment with different doses of anti-CCR8 antibody TPP-15285 or anti-CTLA4 antibody, 24 hours after second treatment or at the end of the study. Absolute numbers of intra-tumoral CD45+ cells. Absolute numbers of intra-tumoral CD4+ conv cells. Absolute numbers of intra-tumoral CD4+ T cells. Absolute numbers of intra-tumoral activated CD8+ T cells. Absolute numbers of intra-tumoral NK cells. Absolute numbers of intra-tumoral CD8+ T cells. Differences were observed e.g. for 10 mg/kg of anti-CCR8 antibody at the end of the study.

[0111] FIG. 52: F9 tumor growth after treatment with different doses of anti-CCR8 antibody TPP-15285 or anti-PDL1 antibody.

[0112] FIG. 53: F9 tumor volume at day 16 after treatment start with different doses of anti-CCR8 antibody TPP-15285 or anti-PDL1 antibody. Significant improvement was observed at least for an antibody dose of 10 mg/kg.

[0113] FIG. 54: Spider plots of F9 tumor bearing mice after treatment with different doses of anti-CCR8 antibodies or anti-PDL1 antibody.

[0114] FIG. 55: Effects of anti-CCR8 antibodies or anti-PDL1 antibody on immune cell populations and their ratios in F9 tumors analyzed by FACS 24 hours after second antibody treatment. Anti-CCR8 antibody increased absolute numbers of intra-tumoral CD45+ T cells, intra-tumoral CD4+ T cells, intra-tumoral CD8+ T cells, intra-tumoral CD4+conv T cells and intra-tumoral NK cells compared with the matched isotype control. Anti-CCR8 antibody at 10 mg/kg decreased absolute numbers of intra-tumoral Treg cells (CD4+, CD25+, FoxP3+).

[0115] FIG. 56: Effects of anti-CCR8 antibodies or anti-PDL1 antibody on immune cell populations and their ratios in F9 tumors analyzed by FACS 24 hours after second treatment plotted as CD8+ T cell to Treg ratio, frequency of Treg to CD4+ T cells, frequency of 4-1BB+ cells of CD8+ T cells, frequency of 4-1BB+ cells of Tregs and frequency of 4-1BB+ cells of conventional CD4+ T cells. At 10 mg/kg anti-CCR8 antibody increased the CD8+ cell to Treg cell ratio to approximately 54 or higher, cf. Table 12.5.1.

[0116] FIG. 57A: Efficacy of combination treatments in C38 tumor bearing mice. C38 tumor growth after treatment with anti-CCR8 surrogate antibodies TPP-14099 or TPP-15285 or anti-PD-L1 antibody or after combination treatment with, 3 mg/kg anti-PDL1 antibody, 10 mg/kg TPP-15285. Significance as determined by 1-Way ANOVA plus Sidak's post-test after log transform.

[0117] FIG. 57B: Efficacy of combination treatments in C38 tumor bearing mice. Survival plot of C38-tumor bearing mice after treatment with anti-murine CCR8 antibody TPP-15285 (10 mg/kg), anti-murine PD-L1 antibody (PDL1, 3 mg/kg) or a combination of TPP-15285 (10 mg/kg) and anti-murine PD-1 antibody (3 mg/kg).

[0118] FIG. 58: Analysis of tumoral Treg depletion in C38 tumors by flow cytometry (sampling 24 hours after second antibody treatment). C38 tumor bearing mice were treated with anti-CCR8 surrogate antibodies TPP-14099 or TPP-15285 or anti-PD-L1 antibody in monotherapy, or with TPP-15285 in combination with anti-PD-L1 antibody. Absolute Treg depletion. CD8+ T cell/Treg cell ratios.

[0119] FIG. 59: CD11+F4/80+ macrophages in C38 tumors as analyzed by flow cytometry (sampling at study end).

[0120] FIG. 60: B16F10-OVA tumor growth after treatment with TPP-15285, anti-CTLA4 antibody or both.

[0121] FIG. 61: EMT-6 tumor growth after treatment with anti-murine CCR8 antibody TPP-15285 (1 mg/kg), anti-murine PD-1 antibody (CDRs: atezolizumab, 10 mg/kg) or a combination of TPP-15285 (1 mg/kg) and anti-murine PD-1 antibody (10 mg/kg), (twice weekly i.p.). Mean with standard deviation.

[0122] FIG. 62: FACS analysis of immune cell populations in EMT-6-tumors analyzed by flow cytometry, sampling 24 hours after second antibody treatment. CD4+ T cells, Tregs, CD8+ T cells, NK cells, Ratios of CD8+ T cells to Tregs. Box and whiskers, min to max with median (GraphPad).

[0123] FIG. 63A: Analysis of C38 tumor bearing mice after treatment with anti-murine CCR8 antibody TPP-15285 (5 mg/kg), anti-murine PD-1 antibody (CDRs: atezolizumab, 5 mg/kg) or a combination of TPP-15285 (5 mg/kg) and anti-murine PD-1 antibody (5 mg/kg), (each twice weekly i.p.). Tumor volume. Mean with standard deviation.

[0124] FIG. 63B: Analysis of C38 tumor bearing mice after treatment with anti-murine CCR8 antibody TPP-15285 (5 mg/kg), anti-murine PD-1 antibody (CDRs: atezolizumab, 5 mg/kg) or a combination of TPP-15285 (5 mg/kg) and anti-murine PD-1 antibody (5 mg/kg), (each twice weekly i.p.). Survival plot.

[0125] FIG. 64: Analysis of tumoral CD4+ T cells, Tregs, CD8+ T cells, NK cells or ratios of CD8+ T cells to Tregs in C38-tumors by flow cytometry (sampling 24 hours after second antibody treatment).

[0126] FIG. 65: MB49 tumor growth after treatment with anti-CCR8 antibody TPP-15285 (10 mg/kg) alone, anti-PD-1 antibody (aPD-1, CDRs: atezolizumab, 10 mg/kg) alone or sequential combination treatment of TPP-15285 (10 mg/kg) and anti-PD-1 antibody (10 mg/kg) (both twice weekly i.p.).

[0127] FIG. 66: Analysis of tumoral CD45+ cells, Tregs, CD8+ T cells, NK cells and ratio of CD8 to Tregs in MB49-tumors by flow cytometry (sampling at study end).

[0128] FIG. 67: EMT-6 tumor growth after treatment with anti-CCR8 antibody TPP-15285 (5 mg/kg, q3/4d i.p.), Oxaliplatin (5 mg/kg, q4d i.p.), Doxorubicin (6 mg/kg, i.v. SD), Docetaxel (10 mg/kg, q2dx5, i.v.) or a combination of TPP-15285 with either Oxaliplatin, Doxorubicin or Docetaxel.

[0129] FIG. 68: MB49 tumor growth after treatment with anti-CCR8 antibody TPP-15285, gemcitabine or a combination of TPP-15285 with gemcitabine.

[0130] FIG. 69: Lewis lung tumor growth after treatment with anti-CCR8 antibody TPP-15285 (10 mg/kg) alone, anti-PD-1 antibody (aPD-1, CDRs: atezolizumab, 10 mg/kg) alone, anti-PD-L1 antibody (10 mg/kg) alone, anti-CTLA4 antibody alone, TPP-15285 (10 mg/kg) and anti-murine PD-1 antibody (10 mg/kg) in combination, or TPP-15285 (10 mg/kg) and anti-PD-L1 antibody (10 mg/kg) in combination.

[0131] FIG. 70: EMT-6 tumor growth after treatment with anti-CCR8 antibody TPP-15285 (3 mg/kg) or radiotherapy (RT, 3×2 Gy) alone or in combination. Significance was determined by 1-Way ANOVA plus Sidak's post-test after log transform.

[0132] FIG. 71: mRNA expression levels of different immune cell markers in different syngeneic tumor models treated with either isotype control (TPP-9809) or anti-CCR8 antibody (TPP-14099). Median expression in the isotype treated control groups is set to zero. Gene expression is measured in transcripts per million (TPM) as estimated by the RSEM algorithm. Treg marker Foxp3. Significantly higher Foxp3 levels are observed in the CT26, H22, Hepa1-6, and RM1 models treated with TPP-14099, indicating increased Treg infiltration, after administration of at least three doses of TPP-14099.

[0133] FIG. 72: Inflammation marker lfng. Signficantly higher lfng levels are observed in the H22, CT26, and RM1 models treated with TPP-14099 pointing towards a strong pro inflammatory activity induced by TPP-14099.

[0134] FIG. 73: Macrophage marker Ms4a7. Significantly higher Ms4a7 levels are observed in the CT26, H22, and Hepa1-6 models treated with TPP-14099, indicating increased infiltration of macrophages caused by TPP-14099.

[0135] FIG. 74: Cytotoxic T cell markers Cd8a and Cd8b1. Significantly higher cytotoxic T cell levels are observed in the CT26, H22, RM1, and Hepa1-6 models treated with TPP-14099 indicating the induction of cytotoxic T cell infiltration and/or proliferation by TPP-14099.

[0136] FIG. 75: Natural killer (NK) cell marker Ncr1. Significantly higher NK cell levels are observed in the CT26, H22, and Hepa1-6 models treated with TPP-14099.

[0137] FIG. 76: Pan T cell markers Cd3e/d/g. Significantly higher T cell levels are observed in the CT26, H22, and Hepa1-6 models treated with TPP-14099.

[0138] FIG. 77: Activated Treg marker and antibody target Ccr8. Significantly higher Ccr8 levels are observed in the CT26, H22, and Hepa1-6 models treated with TPP-14099.

[0139] FIG. 78A and FIG. 78B: Highly specific pro-inflammatory M1 macrophage marker Acod1 (FIG. 78A) and highly specific anti-inflammatory M2 macrophage marker Mrc1 (FIG. 78B). Markedly higher M1 macrophage levels are observed in the CT26, 4T1, H22, Hepa1-6, and RM1 models treated with TPP-14099, while no markedly higher M2 macrophage levels are observed across all models treated with TPP-14099.

[0140] FIG. 79: Ratio of highly specific pro-inflammatory M1 macrophage marker Acod1 and highly specific anti-inflammatory M2 macrophage marker Mrc1. Taken together, multiple doses of anti-CCR8 antibody TPP-14099 increased the M1/M2 macrophage ratio in these tumor models.

[0141] FIG. 80: B cell markers Cd19 and Cd22. Markedly higher B cell levels are observed in the CT26, H22, RM1, and Hepa1-6 models treated with TPP-14099. Anti-CCR8 antibody seems to recruit B cells to the tumor. Without being bound by theory, recruitment of B cells may affect the anti-tumor response elicited by TPP-14099.

[0142] FIG. 81: Expression levels for LTta/b as well as Cxcr5 and its ligand Cxcl13. These markers are crucial for the development of lymph nodes as well as tertiary lymphoid structures (cf. Cyster, Jason G. “Blown away: the unexpected role of lymphotoxin in lymphoid organ development.” The Journal of Immunology 192.5 (2014): 2007-2009, and Cupedo, Tom, et al. “Induction of secondary and tertiary lymphoid structures in the skin.” Immunity 21.5 (2004): 655-667) which are key drivers of an anti-tumor effect in humans (cf. Dieu-Nosjean, Marie-Caroline, et al. “Tertiary lymphoid structures, drivers of the anti-tumor responses in human cancers.” Immunological reviews 271.1 (2016): 260-275). All three publications are incorporated herein by reference in their entirety.

[0143] FIG. 82: Spider plots of tumor growth (measured in mm³) over time in the TPP-14099 treatment group (shown as triangles) and isotype control treated group (shown as circles) for different tumor models. Levels of T cell infiltration at the end of the study, as judged by Cd8a mRNA levels in corresponding bulk tumor samples, are indicated by grey shades (black and light grey correspond to highest and lowest Cd8a levels, respectively). In H22 and CT26, tumor size showed an excellent anti-correlation with Cd8a levels.

[0144] FIG. 83: Correlation between infiltration of the tumor by different immune cell populations as judged by mRNA levels of different immune cell markers and tumor size. TPP-14099 treated tumors are shown as triangles and isotype treated tumors are shown as circles. Tumor size is measured in mm³. Strong negative correlation between cytotoxic T cell infiltration (as judged by Cd8a+Cd8b1 mRNA levels) and CT26 tumor sizes. TPP-14099 treated tumors are smaller in size and show higher Cd8a+Cd8b1 T cell infiltration levels than controls, indicating that increased T cell infiltration upon TPP-14099 treatment causes reduced tumor growth. Strong negative correlation between T cell infiltration (as measured by Cd3 mRNA levels) and CT26 tumor sizes in the TPP-14099 treated tumors. TPP-14099 treated tumors are smaller in size and show higher T cell infiltration levels, i.e. the higher the level of Cd3 mRNA the smaller the tumors. Negative correlation between NK cell infiltration (as judged by NK marker Ncr1 expression) and CT26 tumor sizes. TPP-14099 treated tumors are smaller in size and show higher NK cell infiltration. Tumor size is strongly negatively correlated with NK infiltration, the higher the level of NK, the smaller the tumors. Correlation between postulated induction of tertiary lymphoid structures as judged by Lta/Ltb/Cxcr5 and Cxcl13 mRNA levels and CT26 tumor sizes in the TPP-14099 treated tumors. For each of the four markers, the level is strongly increased after TPP-14099 treatment, and tumor size is strongly negatively correlated with the expression level, indicating that increased formation of tertiary lymphoid structures upon TPP-14099 treatment causes reduced tumor growth.

[0145] FIG. 84: Correlation between Cd8a infiltration levels, as judged by Cd8a mRNA expression, and tumor sizes in the TPP-14099 treated tumors (shown as triangles) and in the isotype treated control group (shown as circles) for different tumor models. TPP-14099 treated tumors are smaller in size and show higher Cd8a infiltration levels. Tumor size is strongly negatively correlated with Cd8a infiltration, the higher the level of Cd8a, the smaller the tumors.

[0146] FIG. 85: Efficacy of CCR8-antibody TPP-15285 in EMT6-tumor bearing mice treated with four different treatment schemes: single treatment, two times BIW treatment, three times BIW treatment, or four times BIW treatment. Each group was treated with vehicle control or 0.1 mg/kg, 1 mg/kg, or 5 mg/kg of TPP-15285.

[0147] FIG. 86: Therapeutic efficacies of inventive anti-CCR8 antibody, anti-PD-1 antibody, anti-PD-L1 antibody, or Paclitaxel tested alone or in combination in MBT2 syngeneic tumor bearing mice as shown in Table 12.6.9.1.

[0148] FIG. 87: Therapeutic efficacy of inventive anti-CCR8 antibody after quantitative depletion of CD8a+ expression in diphtheria toxin treated DTR mice. Depleting Cd8+ T cells abrogates anti-tumor growth effect of TPP15825 (cf. group 02b vs group 01b).

[0149] FIG. 88: Therapeutic efficacy of inventive anti-CCR8 antibody after quantitative depletion of CD19+ expression in diphtheria toxin treated DTR mice. Depleting Cd19+ B cells enhances the anti-tumor growth effect of TPP15825 (cf. group 02b vs group 01b).

[0150] FIG. 89: Internalization curves for various inventive anti-CCR8 antibodies in HUVEC cells. An anti-CD71 antibody with known internalization profile was used as positive control. Corresponding data are shown in Table 10.5.2. None of the antibodies obtained with a method according to the current invention showed substantial internalization, making them particularly useful for ADCC/ADCP based approaches.

### BRIEF DESCRIPTION OF THE SEQUENCE IDS

[0151] The sequence listing provided with the application via electronic filing is included herein in its entirety. SEQ ID NO:1 to SEQ ID NO:108 and SEQ ID NO:157 to SEQ ID NO:168 relate to isolated polypeptides which can be used as antigens or for off target panning. SEQ ID NO:109 to SEQ ID NO:156 relate to chemokine receptor proteins from different species. SEQ ID NO:201 to SEQ ID NO:965 relate to inventive antibodies. The column on sulfations is provided for convenience only and is not intended to restrict the respective sequence in any way.

| | Sequence | | | |
|---|---|---|---|---|
| Sequence Name | Region | Type | SEQ ID | Sulfated |
| P32246_CCR1_ | ANTIGEN | PRT | SEQ ID | Y10, Y18 |
| HUMAN_TRD | | | NO: 1 | |
| Q2Y2P0_CCR1_ | ANTIGEN | PRT | SEQ ID | Y10, Y18 |
| MACFA_TRD | | | NO: 2 | |
| P51675_CCR1_ | ANTIGEN | PRT | SEQ ID | Y10, Y18 |
| MOUSE_TRD | | | NO: 3 | |
| P32246_CCR1_ | ANTIGEN | PRT | SEQ ID | Y10, Y18 |
| HUMAN_N term | | | NO: 4 | |
| Q2Y2P0_CCR1_ | ANTIGEN | PRT | SEQ ID | Y10, Y18 |
| MACFA_N term | | | NO: 5 | |
| P51675_CCR1_MOUSE_N | ANTIGEN | PRT | SEQ ID | Y10, Y18 |
| term | | | NO: 6 | |
| P41597_CCR2_ | ANTIGEN | PRT | SEQ ID | Y26, Y28 |
| HUMAN_TRD | | | NO: 7 | |
| O18793_CCR2_ | ANTIGEN | PRT | SEQ ID | Y26, Y28 |
| MACMU_TRD | | | NO: 8 | |
| P51683_CCR2_ | ANTIGEN | PRT | SEQ ID | Y37, Y39 |
| MOUSE_TRD | | | NO: 9 | |
| P41597_CCR2_ | ANTIGEN | PRT | SEQ ID | Y26, Y28 |
| HUMAN_N term | | | NO: 10 | |
| O18793_CCR2_ | ANTIGEN | PRT | SEQ ID | Y26, Y28 |
| MACMU_N term | | | NO: 11 | |
| P51683_CCR2_MOUSE_N | ANTIGEN | PRT | SEQ ID | Y37, Y39 |
| term | | | NO: 12 | |
| P51677_CCR3_ | ANTIGEN | PRT | SEQ ID | Y16, Y17 |
| HUMAN_TRD | | | NO: 13 | |
| Q9BDS8_CCR3_ | ANTIGEN | PRT | SEQ ID | Y16 |
| MACFA_TRD | | | NO: 14 | |
| P51678_CCR3_ | ANTIGEN | PRT | SEQ ID | Y20, Y22 |
| MOUSE_TRD | | | NO: 15 | |
| P51677_CCR3_ | ANTIGEN | PRT | SEQ ID | Y16, Y17 |
| HUMAN_N term | | | NO: 16 | |
| Q9BDS8_CCR3_ | ANTIGEN | PRT | SEQ ID | Y16 |
| MACFA_N term | | | NO: 17 | |
| P51678_CCR3_MOUSE_N | ANTIGEN | PRT | SEQ ID | Y20, Y22 |
| term | | | NO: 18 | |
| P51679_CCR4_ | ANTIGEN | PRT | SEQ ID | (Y16, Y19, |
| HUMAN_TRD | | | NO: 19 | Y20), Y22 |
| G7NYB7_CCR4_ | ANTIGEN | PRT | SEQ ID | (Y16, Y19, |
| MACFA_TRD | | | NO: 20 | Y20), Y22 |
| P51680_CCR4_ | ANTIGEN | PRT | SEQ ID | (Y16, Y19, |
| MOUSE_TRD | | | NO: 21 | Y20), Y22 |
| P51679_CCR4_ | ANTIGEN | PRT | SEQ ID | (Y16,Y19, |
| HUMAN_N term | | | NO: 22 | Y20), Y22 |
| G7NYB7_CCR4_ | ANTIGEN | PRT | SEQ ID | (Y16, Y19, |
| MACFA_N term | | | NO: 23 | Y20), Y22 |
| P51680_CCR4_MOUSE_N | ANTIGEN | PRT | SEQ ID | (Y16, Y19, |
| term | | | NO: 24 | Y20), Y22 |
| P51681_CCR5_ | ANTIGEN | PRT | SEQ ID | Y3, Y10, |
| HUMAN_TRD | | | NO: 25 | Y14, Y15 |
| P61814_CCR5_ | ANTIGEN | PRT | SEQ ID | Y3, Y10, |
| MACFA_TRD | | | NO: 26 | Y14, Y15 |
| P51682_CCR5_ | ANTIGEN | PRT | SEQ ID | Y10, Y12, |
| MOUSE_TRD | | | NO: 27 | Y16 |
| P51681_CCR5_ | ANTIGEN | PRT | SEQ ID | Y3, Y10, |
| HUMAN_N term | | | NO: 28 | Y14, Y15 |
| P61814_CCR5_MACFA_N | ANTIGEN | PRT | SEQ ID | Y3, Y10, |
| term | | | NO: 29 | Y14, Y15 |
| P51682_CCR5_MOUSE_N | ANTIGEN | PRT | SEQ ID | Y10, Y12, |
| term | | | NO: 30 | Y16 |
| P51684_CCR6_ | ANTIGEN | PRT | SEQ ID | Y18, Y26, |
| HUMAN_TRD | | | NO: 31 | Y27 |
| A0A2K5WY45_CCR6_ | ANTIGEN | PRT | SEQ ID | Y23, Y31, |
| MACFA_TRD | | | NO: 32 | Y32 |
| O54689_CCR6_ | ANTIGEN | PRT | SEQ ID | (Y7), Y13, |
| MOUSE_TRD | | | NO: 33 | Y18, Y19 |
| P51684_CCR6_ | ANTIGEN | PRT | SEQ ID | Y18, Y26, |
| HUMAN_N term | | | NO: 34 | Y27 |
| A0A2K5WY45_CCR6_ | ANTIGEN | PRT | SEQ ID | Y23, Y31, |
| MACFA_N term | | | NO: 35 | Y32 |
| O54689_CCR6_ | ANTIGEN | PRT | SEQ ID | (Y7), Y13, |
| MOUSE_N term | | | NO: 36 | Y18, Y19 |
| P32248_CCR7_ | ANTIGEN | PRT | SEQ ID | Y8, Y17 |
| HUMAN_TRD | | | NO: 37 | |
| C0ISS3_CCR7_ | ANTIGEN | PRT | SEQ ID | Y8, Y17 |
| MACFA_TRD | | | NO: 38 | |
| P47774_CCR7_ | ANTIGEN | PRT | SEQ ID | Y8, Y17, |
| MOUSE_TRD | | | NO: 39 | Y20 |
| P32248_CCR7_HUMAN_N | ANTIGEN | PRT | SEQ ID | Y8, Y17 |
| term (w/o Signal Peptide) | | | NO: 40 | |
| C0ISS3_CCR7_MACFA_N | ANTIGEN | PRT | SEQ ID | Y8, Y17 |
| term (w/o Signal Peptide) | | | NO: 41 | |
| P47774_CCR7_MOUSE_N | ANTIGEN | PRT | SEQ ID | Y8, Y17, |
| term (w/o Signal Peptide) | | | NO: 42 | Y20 |
| P51685_CCR8_ | ANTIGEN | PRT | SEQ ID | Y3, Y15, |
| HUMAN_TRD | | | NO: 43 | (16), Y17 |
| G7NYJ2_CCR8_ | ANTIGEN | PRT | SEQ ID | Y3, Y15, |
| MACFA_TRD | | | NO: 44 | (16), Y17 |
| P56484_CCR8_ | ANTIGEN | PRT | SEQ ID | Y3, Y14, |
| MOUSE_TRD | | | NO: 45 | Y15 |
| P51685_CCR8_HUMAN_N | ANTIGEN | PRT | SEQ ID | Y3, Y15, |
| term | | | NO: 46 | (16), Y17 |
| G7NYJ2_CCR8_ | ANTIGEN | PRT | SEQ ID | Y3, Y15, |
| MACFA_N term | | | NO: 47 | (16), Y17 |
| P56484_CCR8_MOUSE_N | ANTIGEN | PRT | SEQ ID | Y3, Y14, |
| term | | | NO: 48 | Y15 |
| P51685_CCR8_ | ANTIGEN | PRT | SEQ ID | |
| HUMAN_LID | | | NO: 49 | |
| G7NYJ2_CCR8_ | ANTIGEN | PRT | SEQ ID | |
| MACFA_LID | | | NO: 50 | |
| P56484_CCR8_ | ANTIGEN | PRT | SEQ ID | |
| MOUSE_LID | | | NO: 51 | |
| P51685_CCR8_ | ANTIGEN | PRT | SEQ ID | |
| HUMAN_ECL1 | | | NO: 52 | |
| G7NYJ2_CCR8_ | ANTIGEN | PRT | SEQ ID | |
| MACFA_ECL1 | | | NO: 53 | |
| P56484_CCR8_ | ANTIGEN | PRT | SEQ ID | |
| MOUSE_ECL1 | | | NO: 54 | |
| P51685_CCR8_ | ANTIGEN | PRT | SEQ ID | |
| HUMAN_ECL2 | | | NO: 55 | |
| G7NYJ2_CCR8_ | ANTIGEN | PRT | SEQ ID | |
| MACFA_ECL2 | | | NO: 56 | |
| P56484_CCR8_ | ANTIGEN | PRT | SEQ ID | |
| MOUSE_ECL2 | | | NO: 57 | |
| P51685_CCR8_ | ANTIGEN | PRT | SEQ ID | |
| HUMAN_ECL3 | | | NO: 58 | |
| G7NYJ2_CCR8_ | ANTIGEN | PRT | SEQ ID | |
| MACFA_ECL3 | | | NO: 59 | |
| P56484_CCR8_ | ANTIGEN | PRT | SEQ ID | |
| MOUSE_ECL3 | | | NO: 60 | |
| P51686_CCR9_ | ANTIGEN | PRT | SEQ ID | Y17, Y28, |
| HUMAN_TRD | | | NO: 61 | Y37 |
| QOH741_CCR9_ | ANTIGEN | PRT | SEQ ID | Y17, Y28, |
| MACFA_TRD | | | NO: 62 | Y37 |
| Q9WUT7_CCR9_ | ANTIGEN | PRT | SEQ ID | Y19, Y28 |
| MOUSE_TRD | | | NO: 63 | |
| P51686_CCR9_ | ANTIGEN | PRT | SEQ ID | Y17, Y28, |
| HUMAN_N term | | | NO: 64 | Y37 |
| Q0H741_CCR9_ | ANTIGEN | PRT | SEQ ID | Y17, Y28, |
| MACFA_N term | | | NO: 65 | Y37 |
| Q9WUT7_CCR9_ | ANTIGEN | PRT | SEQ ID | Y19, Y28 |
| MOUSE_N term | | | NO: 66 | |
| P46092_CCR10_ | ANTIGEN | PRT | SEQ ID | Y14, Y22 |
| HUMAN_TRD | | | NO: 67 | |
| A0A2K5UAP1_CCR10_ | ANTIGEN | PRT | SEQ ID | Y14, Y22 |
| MACFA_TRD | | | NO: 68 | |
| Q9JL21_CCR10_ | ANTIGEN | PRT | SEQ ID | Y14, Y17, |
| MOUSE_TRD | | | NO: 69 | Y22 |
| P46092_CCR10_ | ANTIGEN | PRT | SEQ ID | Y14, Y22 |
| HUMAN_N term | | | NO: 70 | |
| A0A2K5UAP1_CCR10_ | ANTIGEN | PRT | SEQ ID | Y14, Y22 |
| MACFA_N term | | | NO: 71 | |
| Q9JL21_CCR10_ | ANTIGEN | PRT | SEQ ID | Y14, Y17, |
| MOUSE_N term | | | NO: 72 | Y22 |
| P25024_CXCR1_ | ANTIGEN | PRT | SEQ ID | Y27 |
| HUMAN_TRD | | | NO: 73 | |
| A0A2K5X9E4_CXCR1_ | ANTIGEN | PRT | SEQ ID | Y14, Y28 |
| MACFA_TRD | | | NO: 74 | |
| Q810W6_CXCR1_ | ANTIGEN | PRT | SEQ ID | Y6, Y32 |
| MOUSE_TRD | | | NO: 75 | |
| P25024_CXCR1_ | ANTIGEN | PRT | SEQ ID | Y27 |
| HUMAN_N term | | | NO: 76 | |
| A0A2K5X9E4_CXCR1_ | ANTIGEN | PRT | SEQ ID | Y14, Y28 |
| MACFA_N term | | | NO: 77 | |
| Q810W6_CXCR1_ | ANTIGEN | PRT | SEQ ID | Y6, Y32 |
| MOUSE_N term | | | NO: 78 | |
| P25025_CXCR2_ | ANTIGEN | PRT | SEQ ID | Y23, Y25 |
| HUMAN_TRD | | | NO: 79 | |
| Q28519_CXCR2_ | ANTIGEN | PRT | SEQ ID | Y20, Y22 |
| MACMU_TRD | | | NO: 80 | |
| P35343_CXCR2_ | ANTIGEN | PRT | SEQ ID | Y24 |
| MOUSE_TRD | | | NO: 81 | |
| P25025_CXCR2_ | ANTIGEN | PRT | SEQ ID | Y23, Y25 |
| HUMAN_N term | | | NO: 82 | |
| Q28519_CXCR2_ | ANTIGEN | PRT T | SEQ ID | Y20, Y22 |
| MACMU_N term | | | NO: 83 | |
| P35343_CXCR2_ | ANTIGEN | PRT | SEQ ID | Y24 |
| MOUSE_N term | | | NO: 84 | |
| P49682_CXCR3_ | ANTIGEN | PRT | SEQ ID | Y27, Y29 |
| HUMAN_TRD | | | NO: 85 | |
| A0A2K5UV19_CXCR3_ | ANTIGEN | PRT | SEQ ID | Y27, Y29 |
| MACFA_TRD | | | NO: 86 | |
| O88410_CXCR3_ | ANTIGEN | PRT | SEQ ID | Y2, Y27, |
| MOUSE_TRD | | | NO: 87 | Y29 |
| P49682_CXCR3_ | ANTIGEN | PRT | SEQ ID | Y27, Y29 |
| HUMAN_N term | | | NO: 88 | |
| A0A2K5UV19_CXCR3_ | ANTIGEN | PRT T | SEQ ID | Y27, Y29 |
| MACFA_N term | | | NO: 89 | |
| O88410_CXCR3_ | ANTIGEN | PRT | SEQ ID | Y2, Y27, |
| MOUSE_N term | | | NO: 90 | Y29 |
| P61073_CXCR4_ | ANTIGEN | PRT | SEQ ID | (Y7), Y12, |
| HUMAN_TRD | | | NO: 91 | Y21 |
| Q28474_CXCR4_ | ANTIGEN | PRT | SEQ ID | (Y7), Y12, |
| MACFA_TRD | | | NO: 92 | Y21 |
| P70658_CXCR4_ | ANTIGEN | PRT | SEQ ID | Y9, Y14, |
| MOUSE_TRD | | | NO: 93 | Y23 |
| P61073_CXCR4_ | ANTIGEN | PRT | SEQ ID | (Y7), Y12, |
| HUMAN_N term | | | NO: 94 | Y21 |
| Q28474_CXCR4_ | ANTIGEN | PRT | SEQ ID | (Y7), Y12, |
| MACFA_N term | | | NO: 95 | Y21 |
| P70658_CXCR4_ | ANTIGEN | PRT | SEQ ID | Y9, Y14, |
| MOUSE_N term | | | NO: 96 | Y23 |
| P32302_CXCR5_ | ANTIGEN | PRT | SEQ ID | Y3, Y27 |
| HUMAN_TRD | | | NO: 97 | |
| G8F5K4_CXCR5_ | ANTIGEN | PRT | SEQ ID | Y3, Y27 |
| MACFA_TRD | | | NO: 98 | |
| Q04683_CXCR5_ | ANTIGEN | PRT | SEQ ID | Y3, Y14, |
| MOUSE_TRD | | | NO: 99 | Y20, Y26 |
| P32302_CXCR5_ | ANTIGEN | PRT | SEQ ID | Y3, Y27 |
| HUMAN_N term | | | NO: 100 | |
| G8F5K4_CXCR5_ | ANTIGEN | PRT | SEQ ID | Y3, Y27 |
| MACFA_N term | | | NO: 101 | |
| Q04683_CXCR5_ | ANTIGEN | PRT | SEQ ID | Y3, Y14, |
| MOUSE_N term | | | NO: 102 | Y20, Y26 |
| O00574_CXCR6_ | ANTIGEN | PRT | SEQ ID | Y6, Y10 |
| HUMAN_TRD | | | NO: 103 | |
| Q9BDS6_CXCR6_ | ANTIGEN | PRT | SEQ ID | Y4, Y7, |
| MACFA_TRD | | | NO: 104 | Y39 |
| Q9EQ16_CXCR6_ | ANTIGEN | PRT | SEQ ID | Y11, |
| MOUSE_TRD | | | NO: 105 | (Y15) |
| O00574_CXCR6_ | ANTIGEN | PRT | SEQ ID | Y6, Y10 |
| HUMAN_N term | | | NO: 106 | |
| Q9BDS6_CXCR6_ | ANTIGEN | PRT | SEQ ID | Y4, Y7, |
| MACFA_N term | | | NO: 107 | Y39 |
| Q9EQ16_CXCR6_ | ANTIGEN | PRT | SEQ ID | Y11, |
| MOUSE_N term | | | NO: 108 | (Y15) |
| P32246_CCR1_HUMAN | ANTIGEN | PRT | SEQ ID | |
| | | | NO: 109 | |
| Q2Y2P0_CCR1_MACFA | ANTIGEN | PRT | SEQ ID | |
| | | | NO: 110 | |
| P51675_CCR1_MOUSE | ANTIGEN | PRT | SEQ ID | |
| | | | NO: 111 | |
| P41597_CCR2_HUMAN | ANTIGEN | PRT | SEQ ID | |
| | | | NO: 112 | |
| O18793_CCR2_MACMU | ANTIGEN | PRT | SEQ ID | |
| | | | NO: 113 | |
| P51683_CCR2_MOUSE | ANTIGEN | PRT | SEQ ID | |
| | | | NO: 114 | |
| P51677_CCR3_HUMAN | ANTIGEN | PRT | SEQ ID | |
| | | | NO: 115 | |
| Q9BDS8_CCR3_MACFA | ANTIGEN | PRT | SEQ ID | |
| | | | NO: 116 | |
| P51678_CCR3_MOUSE | ANTIGEN | PRT | SEQ ID | |
| | | | NO: 117 | |
| P51679_CCR4_HUMAN | ANTIGEN | PRT | SEQ ID | |
| | | | NO: 118 | |
| G7NYB7_CCR4_MACFA | ANTIGEN | PRT | SEQ ID | |
| | | | NO: 119 | |
| P51680_CCR4_MOUSE | ANTIGEN | PRT | SEQ ID | |
| | | | NO: 120 | |
| P51681_CCR5_HUMAN | ANTIGEN | PRT | SEQ ID | |
| | | | NO: 121 | |
| P61814_CCR5_MACFA | ANTIGEN | PRT | SEQ ID | |
| | | | NO: 122 | |
| P51682_CCR5_MOUSE | ANTIGEN | PRT | SEQ ID | |
| | | | NO: 123 | |
| P51684_CCR6_HUMAN | ANTIGEN | PRT | SEQ ID | |
| | | | NO: 124 | |
| A0A2K5WY45_ | ANTIGEN | PRT | SEQ ID | |
| CCR6_MACFA | | | NO: 125 | |
| O54689_CCR6_MOUSE | ANTIGEN | PRT | SEQ ID | |
| | | | NO: 126 | |
| P32248_CCR7_HUMAN | ANTIGEN | PRT | SEQ ID | |
| | | | NO: 127 | |
| COISS3_CCR7_MACFA | ANTIGEN | PRT | SEQ ID | |
| | | | NO: 128 | |
| P47774_CCR7_MOUSE | ANTIGEN | PRT | SEQ ID | |
| | | | NO: 129 | |
| P51685_CCR8_HUMAN | ANTIGEN | PRT | SEQ ID | |
| | | | NO: 130 | |
| G7NYJ2_CCR8_MACFA | ANTIGEN | PRT | SEQ ID | |
| | | | NO: 131 | |
| P56484_CCR8_MOUSE | ANTIGEN | PRT | SEQ ID | |
| | | | NO: 132 | |
| P51686_CCR9_HUMAN | ANTIGEN | PRT | SEQ ID | |
| | | | NO: 133 | |
| Q0H741_CCR9_MACFA | ANTIGEN | PRT | SEQ ID | |
| | | | NO: 134 | |
| Q9WUT7_CCR9_MOUSE | ANTIGEN | PRT | SEQ ID | |
| | | | NO: 135 | |
| P46092_CCR10_HUMAN | ANTIGEN | PRT | SEQ ID | |
| | | | NO: 136 | |
| A0A2K5UAP1_ | ANTIGEN | PRT | SEQ ID | |
| CCR10_MACFA | | | NO: 137 | |
| Q9JL21_CCR10_MOUSE | ANTIGEN | PRT | SEQ ID | |
| | | | NO: 138 | |
| P25024_CXCR1_HUMAN | ANTIGEN | PRT | SEQ ID | |
| | | | NO: 139 | |
| A0A2K5X9E4_ | ANTIGEN | PRT | SEQ ID | |
| CXCR1_MACFA | | | NO: 140 | |
| Q810W6_CXCR1_MOUSE | ANTIGEN | PRT | SEQ ID | |
| | | | NO: 141 | |
| P25025_CXCR2_HUMAN | ANTIGEN | PRT | SEQ ID | |
| | | | NO: 142 | |
| Q28519_CXCR2_MACMU | ANTIGEN | PRT | SEQ ID | |
| | | | NO: 143 | |
| P35343_CXCR2_MOUSE | ANTIGEN | PRT | SEQ ID | |
| | | | NO: 144 | |
| P49682_CXCR3_HUMAN | ANTIGEN | PRT | SEQ ID | |
| | | | NO: 145 | |
| A0A2K5UV19_ | ANTIGEN | PRT | SEQ ID | |
| CXCR3_MACFA | | | NO: 146 | |
| O88410_CXCR3_MOUSE | ANTIGEN | PRT | SEQ ID | |
| | | | NO: 147 | |
| P61073_CXCR4_HUMAN | ANTIGEN | PRT | SEQ ID | |
| | | | NO: 148 | |
| Q28474_CXCR4_MACFA | ANTIGEN | PRT | SEQ ID | |
| | | | NO: 149 | |
| P70658_CXCR4_MOUSE | ANTIGEN | PRT | SEQ ID | |
| | | | NO: 150 | |
| P32302_CXCR5_HUMAN | ANTIGEN | PRT | SEQ ID | |
| | | | NO: 151 | |
| G8F5K4_CXCR5_MACFA | ANTIGEN | PRT | SEQ ID | |
| | | | NO: 152 | |
| Q04683_CXCR5_MOUSE | ANTIGEN | PRT | SEQ ID | |
| | | | NO: 153 | |
| O00574_CXCR6_HUMAN | ANTIGEN | PRT | SEQ ID | |
| | | | NO: 154 | |
| Q9BDS6_CXCR6_MACFA | ANTIGEN | PRT | SEQ ID | |
| | | | NO: 155 | |
| Q9EQ16_CXCR6_MOUSE | ANTIGEN | PRT | SEQ ID | |
| | | | NO: 156 | |
| P49238_CX3CR1_ | ANTIGEN | PRT | SEQ ID | Y14 |
| HUMAN_TRD | | | NO: 157 | |
| Q6Y3J6_CX3CR1_ | ANTIGEN | PRT | SEQ ID | Y20 |
| MACFA_TRD | | | NO: 158 | |
| Q9Z0D9_CX3CR1_ | ANTIGEN | PRT | SEQ ID | Y15 |
| MOUSE_TRD | | | NO: 159 | |
| P49238_CX3CR1_ | ANTIGEN | PRT | SEQ ID | Y14, Y22 |
| HUMAN_N Term | | | NO: 160 | |
| Q6Y3J6_CX3CR1_ | ANTIGEN | PRT | SEQ ID | Y20, Y22 |
| MACFA_N Term | | | NO: 161 | |
| Q9Z0D9_CX3CR1_ | ANTIGEN | PRT | SEQ ID | Y15, Y23 |
| MOUSE_N Term | | | NO: 162 | |
| P25024_CXCR1_ | ANTIGEN | PRT | SEQ ID | Y27 |
| HUMAN_TRD | | | NO: 163 | |
| Q2YEGO_CXCR1_ | ANTIGEN | PRT | SEQ ID | Y14, Y28 |
| MACMU_TRD | | | NO: 164 | |
| Q810W6_CXCR1_ | ANTIGEN | PRT | SEQ ID | Y6, Y32 |
| MOUSE_TRD | | | NO: 165 | |
| P25024_CXCR1_ | ANTIGEN | PRT | SEQ ID | Y27 |
| HUMAN_N Term | | | NO: 166 | |
| Q2YEGO_CXCR1_ | ANTIGEN | PRT | SEQ ID | Y14, Y28, |
| MACMU_N Term | | | NO: 167 | Y41 |
| Q810W6_CXCR1_ | ANTIGEN | PRT | SEQ ID | Y6, Y32 |
| MOUSE_N Term | | | NO: 168 | |

| | | Se- | | |
|---|---|---|---|---|
| | | quence | | |
| TPP ID | Sequence Name | Region | Type | SEQ ID |
| TPP-14095 | 497A-M005-E07-hIgG1Lambda | VH | PRT | SEQ ID NO: 201 |
| TPP-14095 | 497A-M005-E07-hIgG1Lambda | HCDR1 | PRT | SEQ ID NO: 202 |
| TPP-14095 | 497A-M005-E07-hIgG1Lambda | HCDR2 | PRT | SEQ ID NO: 203 |
| TPP-14095 | 497A-M005-E07-hIgG1Lambda | HCDR3 | PRT | SEQ ID NO: 204 |
| TPP-14095 | 497A-M005-E07-hIgG1Lambda | VL | PRT | SEQ ID NO: 205 |
| TPP-14095 | 497A-M005-E07-hIgG1Lambda | LCDR1 | PRT | SEQ ID NO: 206 |
| TPP-14095 | 497A-M005-E07-hIgG1Lambda | LCDR2 | PRT | SEQ ID NO: 207 |
| TPP-14095 | 497A-M005-E07-hIgG1Lambda | LCDR3 | PRT | SEQ ID NO: 208 |
| TPP-14095 | 497A-M005-E07-hIgG1Lambda | VH | DNA | SEQ ID NO: 209 |
| TPP-14095 | 497A-M005-E07-hIgG1Lambda | VL | DNA | SEQ ID NO: 210 |
| TPP-14095 | 497A-M005-E07-hIgG1Lambda | HC | PRT | SEQ ID NO: 211 |
| TPP-14095 | 497A-M005-E07-hIgG1Lambda | LC | PRT | SEQ ID NO: 212 |
| TPP-14095 | 497A-M005-E07-hIgG1Lambda | HC | DNA | SEQ ID NO: 213 |
| TPP-14095 | 497A-M005-E07-hIgG1Lambda | LC | DNA | SEQ ID NO: 214 |
| TPP-14099 | 497A-M005-F02-hIgG1Lambda | VH | PRT | SEQ ID NO: 215 |
| TPP-14099 | 497A-M005-F02-hIgG1Lambda | HCDR1 | PRT | SEQ ID NO: 216 |
| TPP-14099 | 497A-M005-F02-hIgG1Lambda | HCDR2 | PRT | SEQ ID NO: 217 |
| TPP-14099 | 497A-M005-F02-hIgG1Lambda | HCDR3 | PRT | SEQ ID NO: 218 |
| TPP-14099 | 497A-M005-F02-hIgG1Lambda | VL | PRT | SEQ ID NO: 219 |
| TPP-14099 | 497A-M005-F02-hIgG1Lambda | LCDR1 | PRT | SEQ ID NO: 220 |
| TPP-14099 | 497A-M005-F02-hIgG1Lambda | LCDR2 | PRT | SEQ ID NO: 221 |
| TPP-14099 | 497A-M005-F02-hIgG1Lambda | LCDR3 | PRT | SEQ ID NO: 222 |
| TPP-14099 | 497A-M005-F02-hIgG1Lambda | VH | DNA | SEQ ID NO: 223 |
| TPP-14099 | 497A-M005-F02-hIgG1Lambda | VL | DNA | SEQ ID NO: 224 |
| TPP-14099 | 497A-M005-F02-hIgG1Lambda | HC | PRT | SEQ ID NO: 225 |
| TPP-14099 | 497A-M005-F02-hIgG1Lambda | LC | PRT | SEQ ID NO: 226 |
| TPP-14099 | 497A-M005-F02-hIgG1Lambda | HC | DNA | SEQ ID NO: 227 |
| TPP-14099 | 497A-M005-F02-hIgG1Lambda | LC | DNA | SEQ ID NO: 228 |
| TPP-15285 | 497A-M005-F02-mIgG2aLambda | VH | PRT | SEQ ID NO: 229 |
| TPP-15285 | 497A-M005-F02-mIgG2aLambda | HCDR1 | PRT | SEQ ID NO: 230 |
| TPP-15285 | 497A-M005-F02-mIgG2aLambda | HCDR2 | PRT | SEQ ID NO: 231 |
| TPP-15285 | 497A-M005-F02-mIgG2aLambda | HCDR3 | PRT | SEQ ID NO: 232 |
| TPP-15285 | 497A-M005-F02-mIgG2aLambda | VL | PRT | SEQ ID NO: 233 |
| TPP-15285 | 497A-M005-F02-mIgG2aLambda | LCDR1 | PRT | SEQ ID NO: 234 |
| TPP-15285 | 497A-M005-F02-mIgG2aLambda | LCDR2 | PRT | SEQ ID NO: 235 |
| TPP-15285 | 497A-M005-F02-mIgG2aLambda | LCDR3 | PRT | SEQ ID NO: 236 |
| TPP-15285 | 497A-M005-F02-mIgG2aLambda | VH | DNA | SEQ ID NO: 237 |
| TPP-15285 | 497A-M005-F02-mIgG2aLambda | VL | DNA | SEQ ID NO: 238 |
| TPP-15285 | 497A-M005-F02-mIgG2aLambda | HC | PRT | SEQ ID NO: 239 |
| TPP-15285 | 497A-M005-F02-mIgG2aLambda | LC | PRT | SEQ ID NO: 240 |
| TPP-15285 | 497A-M005-F02-mIgG2aLambda | HC | DNA | SEQ ID NO: 241 |
| TPP-15285 | 497A-M005-F02-mIgG2aLambda | LC | DNA | SEQ ID NO: 242 |
| TPP-15286 | 497A-M005-E07-mIgG2aLambda | VH | PRT | SEQ ID NO: 243 |
| TPP-15286 | 497A-M005-E07-mIgG2aLambda | HCDR1 | PRT | SEQ ID NO: 244 |
| TPP-15286 | 497A-M005-E07-mIgG2aLambda | HCDR2 | PRT | SEQ ID NO: 245 |
| TPP-15286 | 497A-M005-E07-mIgG2aLambda | HCDR3 | PRT | SEQ ID NO: 246 |
| TPP-15286 | 497A-M005-E07-mIgG2aLambda | VL | PRT | SEQ ID NO: 247 |
| TPP-15286 | 497A-M005-E07-mIgG2aLambda | LCDR1 | PRT | SEQ ID NO: 248 |
| TPP-15286 | 497A-M005-E07-mIgG2aLambda | LCDR2 | PRT | SEQ ID NO: 249 |
| TPP-15286 | 497A-M005-E07-mIgG2aLambda | LCDR3 | PRT | SEQ ID NO: 250 |
| TPP-15286 | 497A-M005-E07-mIgG2aLambda | VH | DNA | SEQ ID NO: 251 |
| TPP-15286 | 497A-M005-E07-mIgG2aLambda | VL | DNA | SEQ ID NO: 252 |
| TPP-15286 | 497A-M005-E07-mIgG2aLambda | HC | PRT | SEQ ID NO: 253 |
| TPP-15286 | 497A-M005-E07-mIgG2aLambda | LC | PRT | SEQ ID NO: 254 |
| TPP-15286 | 497A-M005-E07-mIgG2aLambda | HC | DNA | SEQ ID NO: 255 |
| TPP-15286 | 497A-M005-E07-mIgG2aLambda | LC | DNA | SEQ ID NO: 256 |
| TPP-16966 | 15291-deglyco-hIgG1Lambda | VH | PRT | SEQ ID NO: 257 |
| TPP-16966 | 15291-deglyco-hIgG1Lambda | HCDR1 | PRT | SEQ ID NO: 258 |
| TPP-16966 | 15291-deglyco-hIgG1Lambda | HCDR2 | PRT | SEQ ID NO: 259 |
| TPP-16966 | 15291-deglyco-hIgG1Lambda | HCDR3 | PRT | SEQ ID NO: 260 |
| TPP-16966 | 15291-deglyco-hIgG1Lambda | VL | PRT | SEQ ID NO: 261 |
| TPP-16966 | 15291-deglyco-hIgG1Lambda | LCDR1 | PRT | SEQ ID NO: 262 |
| TPP-16966 | 15291-deglyco-hIgG1Lambda | LCDR2 | PRT | SEQ ID NO: 263 |
| TPP-16966 | 15291-deglyco-hIgG1Lambda | LCDR3 | PRT | SEQ ID NO: 264 |
| TPP-16966 | 15291-deglyco-hIgG1Lambda | VH | DNA | SEQ ID NO: 265 |
| TPP-16966 | 15291-deglyco-hIgG1Lambda | HCDR1 | DNA | SEQ ID NO: 266 |
| TPP-16966 | 15291-deglyco-hIgG1Lambda | HCDR2 | DNA | SEQ ID NO: 267 |
| TPP-16966 | 15291-deglyco-hIgG1Lambda | HCDR3 | DNA | SEQ ID NO: 268 |
| TPP-16966 | 15291-deglyco-hIgG1Lambda | VL | DNA | SEQ ID NO: 269 |
| TPP-16966 | 15291-deglyco-hIgG1Lambda | LCDR1 | DNA | SEQ ID NO: 270 |
| TPP-16966 | 15291-deglyco-hIgG1Lambda | LCDR2 | DNA | SEQ ID NO: 271 |
| TPP-16966 | 15291-deglyco-hIgG1Lambda | LCDR3 | DNA | SEQ ID NO: 272 |
| TPP-16966 | 15291-deglyco-hIgG1Lambda | HC | PRT | SEQ ID NO: 273 |
| TPP-16966 | 15291-deglyco-hIgG1Lambda | LC | PRT | SEQ ID NO: 274 |
| TPP-17575 | 497A-M181-C17-1-hIgG1Lambda | VH | PRT | SEQ ID NO: 275 |
| TPP-17575 | 497A-M181-C17-1-hIgG1Lambda | HCDR1 | PRT | SEQ ID NO: 276 |
| TPP-17575 | 497A-M181-C17-1-hIgG1Lambda | HCDR2 | PRT | SEQ ID NO: 277 |
| TPP-17575 | 497A-M181-C17-1-hIgG1Lambda | HCDR3 | PRT | SEQ ID NO: 278 |
| TPP-17575 | 497A-M181-C17-1-hIgG1Lambda | VL | PRT | SEQ ID NO: 279 |
| TPP-17575 | 497A-M181-C17-1-hIgG1Lambda | LCDR1 | PRT | SEQ ID NO: 280 |
| TPP-17575 | 497A-M181-C17-1-hIgG1Lambda | LCDR2 | PRT | SEQ ID NO: 281 |
| TPP-17575 | 497A-M181-C17-1-hIgG1Lambda | LCDR3 | PRT | SEQ ID NO: 282 |
| TPP-17575 | 497A-M181-C17-1-hIgG1Lambda | VH | DNA | SEQ ID NO: 283 |
| TPP-17575 | 497A-M181-C17-1-hIgG1Lambda | HCDR1 | DNA | SEQ ID NO: 284 |
| TPP-17575 | 497A-M181-C17-1-hIgG1Lambda | HCDR2 | DNA | SEQ ID NO: 285 |
| TPP-17575 | 497A-M181-C17-1-hIgG1Lambda | HCDR3 | DNA | SEQ ID NO: 286 |
| TPP-17575 | 497A-M181-C17-1-hIgG1Lambda | VL | DNA | SEQ ID NO: 287 |
| TPP-17575 | 497A-M181-C17-1-hIgG1Lambda | LCDR1 | DNA | SEQ ID NO: 288 |
| TPP-17575 | 497A-M181-C17-1-hIgG1Lambda | LCDR2 | DNA | SEQ ID NO: 289 |
| TPP-17575 | 497A-M181-C17-1-hIgG1Lambda | LCDR3 | DNA | SEQ ID NO: 290 |
| TPP-17575 | 497A-M181-C17-1-hIgG1Lambda | HC | PRT | SEQ ID NO: 291 |
| TPP-17575 | 497A-M181-C17-1-hIgG1Lambda | LC | PRT | SEQ ID NO: 292 |
| TPP-17576 | 497A-M136-021-1-hIgG1Lambda | VH | PRT | SEQ ID NO: 293 |
| TPP-17576 | 497A-M136-021-1-hIgG1Lambda | HCDR1 | PRT | SEQ ID NO: 294 |
| TPP-17576 | 497A-M136-021-1-hIgG1Lambda | HCDR2 | PRT | SEQ ID NO: 295 |
| TPP-17576 | 497A-M136-021-1-hIgG1Lambda | HCDR3 | PRT | SEQ ID NO: 296 |
| TPP-17576 | 497A-M136-021-1-hIgG1Lambda | VL | PRT | SEQ ID NO: 297 |
| TPP-17576 | 497A-M136-021-1-hIgG1Lambda | LCDR1 | PRT | SEQ ID NO: 298 |
| TPP-17576 | 497A-M136-021-1-hIgG1Lambda | LCDR2 | PRT | SEQ ID NO: 299 |
| TPP-17576 | 497A-M136-021-1-hIgG1Lambda | LCDR3 | PRT | SEQ ID NO: 300 |
| TPP-17576 | 497A-M136-021-1-hIgG1Lambda | VH | DNA | SEQ ID NO: 301 |
| TPP-17576 | 497A-M136-021-1-hIgG1Lambda | HCDR1 | DNA | SEQ ID NO: 302 |
| TPP-17576 | 497A-M136-021-1-hIgG1Lambda | HCDR2 | DNA | SEQ ID NO: 303 |
| TPP-17576 | 497A-M136-021-1-hIgG1Lambda | HCDR3 | DNA | SEQ ID NO: 304 |
| TPP-17576 | 497A-M136-021-1-hIgG1Lambda | VL | DNA | SEQ ID NO: 305 |
| TPP-17576 | 497A-M136-021-1-hIgG1Lambda | LCDR1 | DNA | SEQ ID NO: 306 |
| TPP-17576 | 497A-M136-021-1-hIgG1Lambda | LCDR2 | DNA | SEQ ID NO: 307 |
| TPP-17576 | 497A-M136-021-1-hIgG1Lambda | LCDR3 | DNA | SEQ ID NO: 308 |
| TPP-17576 | 497A-M136-021-1-hIgG1Lambda | HC | PRT | SEQ ID NO: 309 |
| TPP-17576 | 497A-M136-021-1-hIgG1Lambda | LC | PRT | SEQ ID NO: 310 |
| TPP-17577 | 497A-M178-K09-1-hIgG1Lambda | VH | PRT | SEQ ID NO: 311 |
| TPP-17577 | 497A-M178-K09-1-hIgG1Lambda | HCDR1 | PRT | SEQ ID NO: 312 |
| TPP-17577 | 497A-M178-K09-1-hIgG1Lambda | HCDR2 | PRT | SEQ ID NO: 313 |
| TPP-17577 | 497A-M178-K09-1-hIgG1Lambda | HCDR3 | PRT | SEQ ID NO: 314 |
| TPP-17577 | 497A-M178-K09-1-hIgG1Lambda | VL | PRT | SEQ ID NO: 315 |
| TPP-17577 | 497A-M178-K09-1-hIgG1Lambda | LCDR1 | PRT | SEQ ID NO: 316 |
| TPP-17577 | 497A-M178-K09-1-hIgG1Lambda | LCDR2 | PRT | SEQ ID NO: 317 |
| TPP-17577 | 497A-M178-K09-1-hIgG1Lambda | LCDR3 | PRT | SEQ ID NO: 318 |
| TPP-17577 | 497A-M178-K09-1-hIgG1Lambda | VH | DNA | SEQ ID NO: 319 |
| TPP-17577 | 497A-M178-K09-1-hIgG1Lambda | HCDR1 | DNA | SEQ ID NO: 320 |
| TPP-17577 | 497A-M178-K09-1-hIgG1Lambda | HCDR2 | DNA | SEQ ID NO: 321 |
| TPP-17577 | 497A-M178-K09-1-hIgG1Lambda | HCDR3 | DNA | SEQ ID NO: 322 |
| TPP-17577 | 497A-M178-K09-1-hIgG1Lambda | VL | DNA | SEQ ID NO: 323 |
| TPP-17577 | 497A-M178-K09-1-hIgG1Lambda | LCDR1 | DNA | SEQ ID NO: 324 |
| TPP-17577 | 497A-M178-K09-1-hIgG1Lambda | LCDR2 | DNA | SEQ ID NO: 325 |
| TPP-17577 | 497A-M178-K09-1-hIgG1Lambda | LCDR3 | DNA | SEQ ID NO: 326 |
| TPP-17577 | 497A-M178-K09-1-hIgG1Lambda | HC | PRT | SEQ ID NO: 327 |
| TPP-17577 | 497A-M178-K09-1-hIgG1Lambda | LC | PRT | SEQ ID NO: 328 |
| TPP-17578 | 497A-M128-B10-1-hIgG1Lambda | VH | PRT | SEQ ID NO: 329 |
| TPP-17578 | 497A-M128-B10-1-hIgG1Lambda | HCDR1 | PRT | SEQ ID NO: 330 |
| TPP-17578 | 497A-M128-B10-1-hIgG1Lambda | HCDR2 | PRT | SEQ ID NO: 331 |
| TPP-17578 | 497A-M128-B10-1-hIgG1Lambda | HCDR3 | PRT | SEQ ID NO: 332 |
| TPP-17578 | 497A-M128-B10-1-hIgG1Lambda | VL | PRT | SEQ ID NO: 333 |
| TPP-17578 | 497A-M128-B10-1-hIgG1Lambda | LCDR1 | PRT | SEQ ID NO: 334 |
| TPP-17578 | 497A-M128-B10-1-hIgG1Lambda | LCDR2 | PRT | SEQ ID NO: 335 |
| TPP-17578 | 497A-M128-B10-1-hIgG1Lambda | LCDR3 | PRT | SEQ ID NO: 336 |
| TPP-17578 | 497A-M128-B10-1-hIgG1Lambda | VH | DNA | SEQ ID NO: 337 |
| TPP-17578 | 497A-M128-B10-1-hIgG1Lambda | HCDR1 | DNA | SEQ ID NO: 338 |
| TPP-17578 | 497A-M128-B10-1-hIgG1Lambda | HCDR2 | DNA | SEQ ID NO: 339 |
| TPP-17578 | 497A-M128-B10-1-hIgG1Lambda | HCDR3 | DNA | SEQ ID NO: 340 |
| TPP-17578 | 497A-M128-B10-1-hIgG1Lambda | VL | DNA | SEQ ID NO: 341 |
| TPP-17578 | 497A-M128-B10-1-hIgG1Lambda | LCDR1 | DNA | SEQ ID NO: 342 |
| TPP-17578 | 497A-M128-B10-1-hIgG1Lambda | LCDR2 | DNA | SEQ ID NO: 343 |
| TPP-17578 | 497A-M128-B10-1-hIgG1Lambda | LCDR3 | DNA | SEQ ID NO: 344 |
| TPP-17578 | 497A-M128-B10-1-hIgG1Lambda | HC | PRT | SEQ ID NO: 345 |
| TPP-17578 | 497A-M128-B10-1-hIgG1Lambda | LC | PRT | SEQ ID NO: 346 |
| TPP-17579 | 497A-M180-K04-1-hIgG1Lambda | VH | PRT | SEQ ID NO: 347 |
| TPP-17579 | 497A-M180-K04-1-hIgG1Lambda | HCDR1 | PRT | SEQ ID NO: 348 |
| TPP-17579 | 497A-M180-K04-1-hIgG1Lambda | HCDR2 | PRT | SEQ ID NO: 349 |
| TPP-17579 | 497A-M180-K04-1-hIgG1Lambda | HCDR3 | PRT | SEQ ID NO: 350 |
| TPP-17579 | 497A-M180-K04-1-hIgG1Lambda | VL | PRT | SEQ ID NO: 351 |
| TPP-17579 | 497A-M180-K04-1-hIgG1Lambda | LCDR1 | PRT | SEQ ID NO: 352 |
| TPP-17579 | 497A-M180-K04-1-hIgG1Lambda | LCDR2 | PRT | SEQ ID NO: 353 |
| TPP-17579 | 497A-M180-K04-1-hIgG1Lambda | LCDR3 | PRT | SEQ ID NO: 354 |
| TPP-17579 | 497A-M180-K04-1-hIgG1Lambda | VH | DNA | SEQ ID NO: 355 |
| TPP-17579 | 497A-M180-K04-1-hIgG1Lambda | HCDR1 | DNA | SEQ ID NO: 356 |
| TPP-17579 | 497A-M180-K04-1-hIgG1Lambda | HCDR2 | DNA | SEQ ID NO: 357 |
| TPP-17579 | 497A-M180-K04-1-hIgG1Lambda | HCDR3 | DNA | SEQ ID NO: 358 |
| TPP-17579 | 497A-M180-K04-1-hIgG1Lambda | VL | DNA | SEQ ID NO: 359 |
| TPP-17579 | 497A-M180-K04-1-hIgG1Lambda | LCDR1 | DNA | SEQ ID NO: 360 |
| TPP-17579 | 497A-M180-K04-1-hIgG1Lambda | LCDR2 | DNA | SEQ ID NO: 361 |
| TPP-17579 | 497A-M180-K04-1-hIgG1Lambda | LCDR3 | DNA | SEQ ID NO: 362 |
| TPP-17579 | 497A-M180-K04-1-hIgG1Lambda | HC | PRT | SEQ ID NO: 363 |
| TPP-17579 | 497A-M180-K04-1-hIgG1Lambda | LC | PRT | SEQ ID NO: 364 |
| TPP-17580 | 497A-M193-A08-1-hIgG1Lambda | VH | PRT | SEQ ID NO: 365 |
| TPP-17580 | 497A-M193-A08-1-hIgG1Lambda | HCDR1 | PRT | SEQ ID NO: 366 |
| TPP-17580 | 497A-M193-A08-1-hIgG1Lambda | HCDR2 | PRT | SEQ ID NO: 367 |
| TPP-17580 | 497A-M193-A08-1-hIgG1Lambda | HCDR3 | PRT | SEQ ID NO: 368 |
| TPP-17580 | 497A-M193-A08-1-hIgG1Lambda | VL | PRT | SEQ ID NO: 369 |
| TPP-17580 | 497A-M193-A08-1-hIgG1Lambda | LCDR1 | PRT | SEQ ID NO: 370 |
| TPP-17580 | 497A-M193-A08-1-hIgG1Lambda | LCDR2 | PRT | SEQ ID NO: 371 |
| TPP-17580 | 497A-M193-A08-1-hIgG1Lambda | LCDR3 | PRT | SEQ ID NO: 372 |
| TPP-17580 | 497A-M193-A08-1-hIgG1Lambda | VH | DNA | SEQ ID NO: 373 |
| TPP-17580 | 497A-M193-A08-1-hIgG1Lambda | HCDR1 | DNA | SEQ ID NO: 374 |
| TPP-17580 | 497A-M193-A08-1-hIgG1Lambda | HCDR2 | DNA | SEQ ID NO: 375 |
| TPP-17580 | 497A-M193-A08-1-hIgG1Lambda | HCDR3 | DNA | SEQ ID NO: 376 |
| TPP-17580 | 497A-M193-A08-1-hIgG1Lambda | VL | DNA | SEQ ID NO: 377 |
| TPP-17580 | 497A-M193-A08-1-hIgG1Lambda | LCDR1 | DNA | SEQ ID NO: 378 |
| TPP-17580 | 497A-M193-A08-1-hIgG1Lambda | LCDR2 | DNA | SEQ ID NO: 379 |
| TPP-17580 | 497A-M193-A08-1-hIgG1Lambda | LCDR3 | DNA | SEQ ID NO: 380 |
| TPP-17580 | 497A-M193-A08-1-hIgG1Lambda | HC | PRT | SEQ ID NO: 381 |
| TPP-17580 | 497A-M193-A08-1-hIgG1Lambda | LC | PRT | SEQ ID NO: 382 |
| TPP-17581 | 497A-M177-L03-1-hIgG1Lambda | VH | PRT | SEQ ID NO: 383 |
| TPP-17581 | 497A-M177-L03-1-hIgG1Lambda | HCDR1 | PRT | SEQ ID NO: 384 |
| TPP-17581 | 497A-M177-L03-1-hIgG1Lambda | HCDR2 | PRT | SEQ ID NO: 385 |
| TPP-17581 | 497A-M177-L03-1-hIgG1Lambda | HCDR3 | PRT | SEQ ID NO: 386 |
| TPP-17581 | 497A-M177-L03-1-hIgG1Lambda | VL | PRT | SEQ ID NO: 387 |
| TPP-17581 | 497A-M177-L03-1-hIgG1Lambda | LCDR1 | PRT | SEQ ID NO: 388 |
| TPP-17581 | 497A-M177-L03-1-hIgG1Lambda | LCDR2 | PRT | SEQ ID NO: 389 |
| TPP-17581 | 497A-M177-L03-1-hIgG1Lambda | LCDR3 | PRT | SEQ ID NO: 390 |
| TPP-17581 | 497A-M177-L03-1-hIgG1Lambda | VH | DNA | SEQ ID NO: 391 |
| TPP-17581 | 497A-M177-L03-1-hIgG1Lambda | HCDR1 | DNA | SEQ ID NO: 392 |
| TPP-17581 | 497A-M177-L03-1-hIgG1Lambda | HCDR2 | DNA | SEQ ID NO: 393 |
| TPP-17581 | 497A-M177-L03-1-hIgG1Lambda | HCDR3 | DNA | SEQ ID NO: 394 |
| TPP-17581 | 497A-M177-L03-1-hIgG1Lambda | VL | DNA | SEQ ID NO: 395 |
| TPP-17581 | 497A-M177-L03-1-hIgG1Lambda | LCDR1 | DNA | SEQ ID NO: 396 |
| TPP-17581 | 497A-M177-L03-1-hIgG1Lambda | LCDR2 | DNA | SEQ ID NO: 397 |
| TPP-17581 | 497A-M177-L03-1-hIgG1Lambda | LCDR3 | DNA | SEQ ID NO: 398 |
| TPP-17581 | 497A-M177-L03-1-hIgG1Lambda | HC | PRT | SEQ ID NO: 399 |
| TPP-17581 | 497A-M177-L03-1-hIgG1Lambda | LC | PRT | SEQ ID NO: 400 |
| TPP-18205 | 004-F10_497A-M296- L12 + 497A-M326- | VH | PRT | SEQ ID NO: 401 |
| | O09-hIgG1Lambda | | | |
| TPP-18205 | 004-F10_497A-M296- L12 + 497A-M326- | HCDR1 | PRT | SEQ ID NO: 402 |
| | O09-hIgG1Lambda | | | |
| TPP-18205 | 004-F10_497A-M296- L12 + 497A-M326- | HCDR2 | PRT | SEQ ID NO: 403 |
| | O09-hIgG1Lambda | | | |
| TPP-18205 | 004-F10_497A-M296- L12 + 497A-M326- | HCDR3 | PRT | SEQ ID NO: 404 |
| | O09-hIgG1Lambda | | | |
| TPP-18205 | 004-F10_497A-M296- L12 + 497A-M326- | VL | PRT | SEQ ID NO: 405 |
| | O09-hIgG1Lambda | | | |
| TPP-18205 | 004-F10_497A-M296- L12 + 497A-M326- | LCDR1 | PRT | SEQ ID NO: 406 |
| | O09-hIgG1Lambda | | | |
| TPP-18205 | 004-F10_497A-M296- L12 + 497A-M326- | LCDR2 | PRT | SEQ ID NO: 407 |
| | O09-hIgG1Lambda | | | |
| TPP-18205 | 004-F10_497A-M296- L12 + 497A-M326- | LCDR3 | PRT | SEQ ID NO: 408 |
| | O09-hIgG1Lambda | | | |
| TPP-18205 | 004-F10_497A-M296- L12 + 497A-M326- | VH | DNA | SEQ ID NO: 409 |
| | O09-hIgG1Lambda | | | |
| TPP-18205 | 004-F10_497A-M296- L12 + 497A-M326- | HCDR1 | DNA | SEQ ID NO: 410 |
| | O09-hIgG1Lambda | | | |
| TPP-18205 | 004-F10_497A-M296- L12 + 497A-M326- | HCDR2 | DNA | SEQ ID NO: 411 |
| | O09-hIgG1Lambda | | | |
| TPP-18205 | 004-F10_497A-M296- L12 + 497A-M326- | HCDR3 | DNA | SEQ ID NO: 412 |
| | O09-hIgG1Lambda | | | |
| TPP-18205 | 004-F10_497A-M296- L12 + 497A-M326- | VL | DNA | SEQ ID NO: 413 |
| | O09-hIgG1Lambda | | | |
| TPP-18205 | 004-F10_497A-M296- L12 + 497A-M326- | LCDR1 | DNA | SEQ ID NO: 414 |
| | O09-hIgG1Lambda | | | |
| TPP-18205 | 004-F10_497A-M296- L12 + 497A-M326- | LCDR2 | DNA | SEQ ID NO: 415 |
| | O09-hIgG1Lambda | | | |
| TPP-18205 | 004-F10_497A-M296- L12 + 497A-M326- | LCDR3 | DNA | SEQ ID NO: 416 |
| | O09-hIgG1Lambda | | | |
| TPP-18205 | 004-F10_497A-M296- L12 + 497A-M326- | HC | PRT | SEQ ID NO: 417 |
| | O09-hIgG1Lambda | | | |
| TPP-18205 | 004-F10_497A-M296- L12 + 497A-M326- | LC | PRT | SEQ ID NO: 418 |
| | O09-hIgG1Lambda | | | |
| TPP-18206 | 002-F01_497A-M281- P02 + 497A-M317- | VH | PRT | SEQ ID NO: 419 |
| | O07-hIgG1Lambda | | | |
| TPP-18206 | 002-F01_497A-M281- P02 + 497A-M317- | HCDR1 | PRT | SEQ ID NO: 420 |
| | O07-hIgG1Lambda | | | |
| TPP-18206 | 002-F01_497A-M281- P02 + 497A-M317- | HCDR2 | PRT | SEQ ID NO: 421 |
| | O07-hIgG1Lambda | | | |
| TPP-18206 | 002-F01_497A-M281- P02 + 497A-M317- | HCDR3 | PRT | SEQ ID NO: 422 |
| | O07-hIgG1Lambda | | | |
| TPP-18206 | 002-F01_497A-M281- P02 + 497A-M317- | VL | PRT | SEQ ID NO: 423 |
| | O07-hIgG1Lambda | | | |
| TPP-18206 | 002-F01_497A-M281- P02 + 497A-M317- | LCDR1 | PRT | SEQ ID NO: 424 |
| | O07-hIgG1Lambda | | | |
| TPP-18206 | 002-F01_497A-M281- P02 + 497A-M317- | LCDR2 | PRT | SEQ ID NO: 425 |
| | O07-hIgG1Lambda | | | |
| TPP-18206 | 002-F01_497A-M281- P02 + 497A-M317- | LCDR3 | PRT | SEQ ID NO: 426 |
| | O07-hIgG1Lambda | | | |
| TPP-18206 | 002-F01_497A-M281- P02 + 497A-M317- | VH | DNA | SEQ ID NO: 427 |
| | O07-hIgG1Lambda | | | |
| TPP-18206 | 002-F01_497A-M281- P02 + 497A-M317- | HCDR1 | DNA | SEQ ID NO: 428 |
| | O07-hIgG1Lambda | | | |
| TPP-18206 | 002-F01_497A-M281- P02 + 497A-M317- | HCDR2 | DNA | SEQ ID NO: 429 |
| | O07-hIgG1Lambda | | | |
| TPP-18206 | 002-F01_497A-M281- P02 + 497A-M317- | HCDR3 | DNA | SEQ ID NO: 430 |
| | O07-hIgG1Lambda | | | |
| TPP-18206 | 002-F01_497A-M281- P02 + 497A-M317- | VL | DNA | SEQ ID NO: 431 |
| | O07-hIgG1Lambda | | | |
| TPP-18206 | 002-F01_497A-M281- P02 + 497A-M317- | LCDR1 | DNA | SEQ ID NO: 432 |
| | O07-hIgG1Lambda | | | |
| TPP-18206 | 002-F01_497A-M281- P02 + 497A-M317- | LCDR2 | DNA | SEQ ID NO: 433 |
| | O07-hIgG1Lambda | | | |
| TPP-18206 | 002-F01_497A-M281- P02 + 497A-M317- | LCDR3 | DNA | SEQ ID NO: 434 |
| | O07-hIgG1Lambda | | | |
| TPP-18206 | 002-F01_497A-M281- P02 + 497A-M317- | HC | PRT | SEQ ID NO: 435 |
| | O07-hIgG1Lambda | | | |
| TPP-18206 | 002-F01_497A-M281- P02 + 497A-M317- | LC | PRT | SEQ ID NO: 436 |
| | O07-hIgG1Lambda | | | |
| TPP-18207 | 001-B08_497A-M301- B18 + 497A-M316- | VH | PRT | SEQ ID NO: 437 |
| | D16-hIgG1Lambda | | | |
| TPP-18207 | 001-B08_497A-M301- B18 + 497A-M316- | HCDR1 | PRT | SEQ ID NO: 438 |
| | D16-hIgG1Lambda | | | |
| TPP-18207 | 001-B08_497A-M301- B18 + 497A-M316- | HCDR2 | PRT | SEQ ID NO: 439 |
| | D16-hIgG1Lambda | | | |
| TPP-18207 | 001-B08_497A-M301- B18 + 497A-M316- | HCDR3 | PRT | SEQ ID NO: 440 |
| | D16-hIgG1Lambda | | | |
| TPP-18207 | 001-B08_497A-M301- B18 + 497A-M316- | VL | PRT | SEQ ID NO: 441 |
| | D16-hIgG1Lambda | | | |
| TPP-18207 | 001-B08_497A-M301- B18 + 497A-M316- | LCDR1 | PRT | SEQ ID NO: 442 |
| | D16-hIgG1Lambda | | | |
| TPP-18207 | 001-B08_497A-M301- B18 + 497A-M316- | LCDR2 | PRT | SEQ ID NO: 443 |
| | D16-hIgG1Lambda | | | |
| TPP-18207 | 001-B08_497A-M301- B18 + 497A-M316- | LCDR3 | PRT | SEQ ID NO: 444 |
| | D16-hIgG1Lambda | | | |
| TPP-18207 | 001-B08_497A-M301- B18 + 497A-M316- | VH | DNA | SEQ ID NO: 445 |
| | D16-hIgG1Lambda | | | |
| TPP-18207 | 001-B08_497A-M301- B18 + 497A-M316- | HCDR1 | DNA | SEQ ID NO: 446 |
| | D16-hIgG1Lambda | | | |
| TPP-18207 | 001-B08_497A-M301- B18 + 497A-M316- | HCDR2 | DNA | SEQ ID NO: 447 |
| | D16-hIgG1Lambda | | | |
| TPP-18207 | 001-B08_497A-M301- B18 + 497A-M316- | HCDR3 | DNA | SEQ ID NO: 448 |
| | D16-hIgG1Lambda | | | |
| TPP-18207 | 001-B08_497A-M301- B18 + 497A-M316- | VL | DNA | SEQ ID NO: 449 |
| | D16-hIgG1Lambda | | | |
| TPP-18207 | 001-B08_497A-M301- B18 + 497A-M316- | LCDR1 | DNA | SEQ ID NO: 450 |
| | D16-hIgG1Lambda | | | |
| TPP-18207 | 001-B08_497A-M301- B18 + 497A-M316- | LCDR2 | DNA | SEQ ID NO: 451 |
| | D16-hIgG1Lambda | | | |
| TPP-18207 | 001-B08_497A-M301- B18 + 497A-M316- | LCDR3 | DNA | SEQ ID NO: 452 |
| | D16-hIgG1Lambda | | | |
| TPP-18207 | 001-B08_497A-M301- B18 + 497A-M316- | HC | PRT | SEQ ID NO: 453 |
| | D16-hIgG1Lambda | | | |
| TPP-18207 | 001-B08_497A-M301- B18 + 497A-M316- | LC | PRT | SEQ ID NO: 454 |
| | D16-hIgG1Lambda | | | |
| TPP-19546 | 17578-gl33-hIgG1Lambda | VH | PRT | SEQ ID NO: 455 |
| TPP-19546 | 17578-gl33-hIgG1Lambda | HCDR1 | PRT | SEQ ID NO: 456 |
| TPP-19546 | 17578-gl33-hIgG1Lambda | HCDR2 | PRT | SEQ ID NO: 457 |
| TPP-19546 | 17578-gl33-hIgG1Lambda | HCDR3 | PRT | SEQ ID NO: 458 |
| TPP-19546 | 17578-gl33-hIgG1Lambda | VL | PRT | SEQ ID NO: 459 |
| TPP-19546 | 17578-gl33-hIgG1Lambda | LCDR1 | PRT | SEQ ID NO: 460 |
| TPP-19546 | 17578-gl33-hIgG1Lambda | LCDR2 | PRT | SEQ ID NO: 461 |
| TPP-19546 | 17578-gl33-hIgG1Lambda | LCDR3 | PRT | SEQ ID NO: 462 |
| TPP-19546 | 17578-gl33-hIgG1Lambda | VH | DNA | SEQ ID NO: 463 |
| TPP-19546 | 17578-gl33-hIgG1Lambda | HCDR1 | DNA | SEQ ID NO: 464 |
| TPP-19546 | 17578-gl33-hIgG1Lambda | HCDR2 | DNA | SEQ ID NO: 465 |
| TPP-19546 | 17578-gl33-hIgG1Lambda | HCDR3 | DNA | SEQ ID NO: 466 |
| TPP-19546 | 17578-gl33-hIgG1Lambda | VL | DNA | SEQ ID NO: 467 |
| TPP-19546 | 17578-gl33-hIgG1Lambda | LCDR1 | DNA | SEQ ID NO: 468 |
| TPP-19546 | 17578-gl33-hIgG1Lambda | LCDR2 | DNA | SEQ ID NO: 469 |
| TPP-19546 | 17578-gl33-hIgG1Lambda | LCDR3 | DNA | SEQ ID NO: 470 |
| TPP-19546 | 17578-gl33-hIgG1Lambda | HC | PRT | SEQ ID NO: 471 |
| TPP-19546 | 17578-gl33-hIgG1Lambda | LC | PRT | SEQ ID NO: 472 |
| TPP-20950 | 18206-gl-42-hIgG1wt-Lambda | VH | PRT | SEQ ID NO: 473 |
| TPP-20950 | 18206-gl-42-hIgG1wt-Lambda | HCDR1 | PRT | SEQ ID NO: 474 |
| TPP-20950 | 18206-gl-42-hIgG1wt-Lambda | HCDR2 | PRT | SEQ ID NO: 475 |
| TPP-20950 | 18206-gl-42-hIgG1wt-Lambda | HCDR3 | PRT | SEQ ID NO: 476 |
| TPP-20950 | 18206-gl-42-hIgG1wt-Lambda | VL | PRT | SEQ ID NO: 477 |
| TPP-20950 | 18206-gl-42-hIgG1wt-Lambda | LCDR1 | PRT | SEQ ID NO: 478 |
| TPP-20950 | 18206-gl-42-hIgG1wt-Lambda | LCDR2 | PRT | SEQ ID NO: 479 |
| TPP-20950 | 18206-gl-42-hIgG1wt-Lambda | LCDR3 | PRT | SEQ ID NO: 480 |
| TPP-20950 | 18206-gl-42-hIgG1wt-Lambda | VH | DNA | SEQ ID NO: 481 |
| TPP-20950 | 18206-gl-42-hIgG1wt-Lambda | HCDR1 | DNA | SEQ ID NO: 482 |
| TPP-20950 | 18206-gl-42-hIgG1wt-Lambda | HCDR2 | DNA | SEQ ID NO: 483 |
| TPP-20950 | 18206-gl-42-hIgG1wt-Lambda | HCDR3 | DNA | SEQ ID NO: 484 |
| TPP-20950 | 18206-gl-42-hIgG1wt-Lambda | VL | DNA | SEQ ID NO: 485 |
| TPP-20950 | 18206-gl-42-hIgG1wt-Lambda | LCDR1 | DNA | SEQ ID NO: 486 |
| TPP-20950 | 18206-gl-42-hIgG1wt-Lambda | LCDR2 | DNA | SEQ ID NO: 487 |
| TPP-20950 | 18206-gl-42-hIgG1wt-Lambda | LCDR3 | DNA | SEQ ID NO: 488 |
| TPP-20950 | 18206-gl-42-hIgG1wt-Lambda | HC | PRT | SEQ ID NO: 489 |
| TPP-20950 | 18206-gl-42-hIgG1wt-Lambda | LC | PRT | SEQ ID NO: 490 |
| TPP-20955 | 18206-gl-47-hIgG1wt-Lambda | VH | PRT | SEQ ID NO: 491 |
| TPP-20955 | 18206-gl-47-hIgG1wt-Lambda | HCDR1 | PRT | SEQ ID NO: 492 |
| TPP-20955 | 18206-gl-47-hIgG1wt-Lambda | HCDR2 | PRT | SEQ ID NO: 493 |
| TPP-20955 | 18206-gl-47-hIgG1wt-Lambda | HCDR3 | PRT | SEQ ID NO: 494 |
| TPP-20955 | 18206-gl-47-hIgG1wt-Lambda | VL | PRT | SEQ ID NO: 495 |
| TPP-20955 | 18206-gl-47-hIgG1wt-Lambda | LCDR1 | PRT | SEQ ID NO: 496 |
| TPP-20955 | 18206-gl-47-hIgG1wt-Lambda | LCDR2 | PRT | SEQ ID NO: 497 |
| TPP-20955 | 18206-gl-47-hIgG1wt-Lambda | LCDR3 | PRT | SEQ ID NO: 498 |
| TPP-20955 | 18206-gl-47-hIgG1wt-Lambda | VH | DNA | SEQ ID NO: 499 |
| TPP-20955 | 18206-gl-47-hIgG1wt-Lambda | HCDR1 | DNA | SEQ ID NO: 500 |
| TPP-20955 | 18206-gl-47-hIgG1wt-Lambda | HCDR2 | DNA | SEQ ID NO: 501 |
| TPP-20955 | 18206-gl-47-hIgG1wt-Lambda | HCDR3 | DNA | SEQ ID NO: 502 |
| TPP-20955 | 18206-gl-47-hIgG1wt-Lambda | VL | DNA | SEQ ID NO: 503 |
| TPP-20955 | 18206-gl-47-hIgG1wt-Lambda | LCDR1 | DNA | SEQ ID NO: 504 |
| TPP-20955 | 18206-gl-47-hIgG1wt-Lambda | LCDR2 | DNA | SEQ ID NO: 505 |
| TPP-20955 | 18206-gl-47-hIgG1wt-Lambda | LCDR3 | DNA | SEQ ID NO: 506 |
| TPP-20955 | 18206-gl-47-hIgG1wt-Lambda | HC | PRT | SEQ ID NO: 507 |
| TPP-20955 | 18206-gl-47-hIgG1wt-Lambda | LC | PRT | SEQ ID NO: 508 |
| TPP-20965 | 18206-gl-58-hIgG1wt-Lambda | VH | PRT | SEQ ID NO: 509 |
| TPP-20965 | 18206-gl-58-hIgG1wt-Lambda | HCDR1 | PRT | SEQ ID NO: 510 |
| TPP-20965 | 18206-gl-58-hIgG1wt-Lambda | HCDR2 | PRT | SEQ ID NO: 511 |
| TPP-20965 | 18206-gl-58-hIgG1wt-Lambda | HCDR3 | PRT | SEQ ID NO: 512 |
| TPP-20965 | 18206-gl-58-hIgG1wt-Lambda | VL | PRT | SEQ ID NO: 513 |
| TPP-20965 | 18206-gl-58-hIgG1wt-Lambda | LCDR1 | PRT | SEQ ID NO: 514 |
| TPP-20965 | 18206-gl-58-hIgG1wt-Lambda | LCDR2 | PRT | SEQ ID NO: 515 |
| TPP-20965 | 18206-gl-58-hIgG1wt-Lambda | LCDR3 | PRT | SEQ ID NO: 516 |
| TPP-20965 | 18206-gl-58-hIgG1wt-Lambda | VH | DNA | SEQ ID NO: 517 |
| TPP-20965 | 18206-gl-58-hIgG1wt-Lambda | HCDR1 | DNA | SEQ ID NO: 518 |
| TPP-20965 | 18206-gl-58-hIgG1wt-Lambda | HCDR2 | DNA | SEQ ID NO: 519 |
| TPP-20965 | 18206-gl-58-hIgG1wt-Lambda | HCDR3 | DNA | SEQ ID NO: 520 |
| TPP-20965 | 18206-gl-58-hIgG1wt-Lambda | VL | DNA | SEQ ID NO: 521 |
| TPP-20965 | 18206-gl-58-hIgG1wt-Lambda | LCDR1 | DNA | SEQ ID NO: 522 |
| TPP-20965 | 18206-gl-58-hIgG1wt-Lambda | LCDR2 | DNA | SEQ ID NO: 523 |
| TPP-20965 | 18206-gl-58-hIgG1wt-Lambda | LCDR3 | DNA | SEQ ID NO: 524 |
| TPP-20965 | 18206-gl-58-hIgG1wt-Lambda | HC | PRT | SEQ ID NO: 525 |
| TPP-20965 | 18206-gl-58-hIgG1wt-Lambda | LC | PRT | SEQ ID NO: 526 |
| TPP-21045 | 17578-gl79-hIgG1-wt-Lambda | VH | PRT | SEQ ID NO: 527 |
| TPP-21045 | 17578-gl79-hIgG1-wt-Lambda | HCDR | PRT | SEQ ID NO: 528 |
| TPP-21045 | 17578-gl79-hIgG1-wt-Lambda | HCDR2 | PRT | SEQ ID NO: 529 |
| TPP-21045 | 17578-gl79-hIgG1-wt-Lambda | HCDR3 | PRT | SEQ ID NO: 530 |
| TPP-21045 | 17578-gl79-hIgG1-wt-Lambda | VL | PRT | SEQ ID NO: 531 |
| TPP-21045 | 17578-gl79-hIgG1-wt-Lambda | LCDR1 | PRT | SEQ ID NO: 532 |
| TPP-21045 | 17578-gl79-hIgG1-wt-Lambda | LCDR2 | PRT | SEQ ID NO: 533 |
| TPP-21045 | 17578-gl79-hIgG1-wt-Lambda | LCDR3 | PRT | SEQ ID NO: 534 |
| TPP-21045 | 17578-gl79-hIgG1-wt-Lambda | VH | DNA | SEQ ID NO: 535 |
| TPP-21045 | 17578-gl79-hIgG1-wt-Lambda | HCDR1 | DNA | SEQ ID NO: 536 |
| TPP-21045 | 17578-gl79-hIgG1-wt-Lambda | HCDR2 | DNA | SEQ ID NO: 537 |
| TPP-21045 | 17578-gl79-hIgG1-wt-Lambda | HCDR3 | DNA | SEQ ID NO: 538 |
| TPP-21045 | 17578-gl79-hIgG1-wt-Lambda | VL | DNA | SEQ ID NO: 539 |
| TPP-21045 | 17578-gl79-hIgG1-wt-Lambda | LCDR1 | DNA | SEQ ID NO: 540 |
| TPP-21045 | 17578-gl79-hIgG1-wt-Lambda | LCDR2 | DNA | SEQ ID NO: 541 |
| TPP-21045 | 17578-gl79-hIgG1-wt-Lambda | LCDR3 | DNA | SEQ ID NO: 542 |
| TPP-21045 | 17578-gl79-hIgG1-wt-Lambda | HC | PRT | SEQ ID NO: 543 |
| TPP-21045 | 17578-gl79-hIgG1-wt-Lambda | LC | PRT | SEQ ID NO: 544 |
| TPP-21047 | 17578-gl81-hIgG1-wt-Lambda | VH | PRT | SEQ ID NO: 545 |
| TPP-21047 | 17578-gl81-hIgG1-wt-Lambda | HCDR1 | PRT | SEQ ID NO: 546 |
| TPP-21047 | 17578-gl81-hIgG1-wt-Lambda | HCDR2 | PRT | SEQ ID NO: 547 |
| TPP-21047 | 17578-gl81-hIgG1-wt-Lambda | HCDR3 | PRT | SEQ ID NO: 548 |
| TPP-21047 | 17578-gl81-hIgG1-wt-Lambda | VL | PRT | SEQ ID NO: 549 |
| TPP-21047 | 17578-gl81-hIgG1-wt-Lambda | LCDR1 | PRT | SEQ ID NO: 550 |
| TPP-21047 | 17578-gl81-hIgG1-wt-Lambda | LCDR2 | PRT | SEQ ID NO: 551 |
| TPP-21047 | 17578-gl81-hIgG1-wt-Lambda | LCDR3 | PRT | SEQ ID NO: 552 |
| TPP-21047 | 17578-gl81-hIgG1-wt-Lambda | VH | DNA | SEQ ID NO: 553 |
| TPP-21047 | 17578-gl81-hIgG1-wt-Lambda | HCDR1 | DNA | SEQ ID NO: 554 |
| TPP-21047 | 17578-gl81-hIgG1-wt-Lambda | HCDR2 | DNA | SEQ ID NO: 555 |
| TPP-21047 | 17578-gl81-hIgG1-wt-Lambda | HCDR3 | DNA | SEQ ID NO: 556 |
| TPP-21047 | 17578-gl81-hIgG1-wt-Lambda | VL | DNA | SEQ ID NO: 557 |
| TPP-21047 | 17578-gl81-hIgG1-wt-Lambda | LCDR1 | DNA | SEQ ID NO: 558 |
| TPP-21047 | 17578-gl81-hIgG1-wt-Lambda | LCDR2 | DNA | SEQ ID NO: 559 |
| TPP-21047 | 17578-gl81-hIgG1-wt-Lambda | LCDR3 | DNA | SEQ ID NO: 560 |
| TPP-21047 | 17578-gl81-hIgG1-wt-Lambda | HC | PRT | SEQ ID NO: 561 |
| TPP-21047 | 17578-gl81-hIgG1-wt-Lambda | LC | PRT | SEQ ID NO: 562 |
| TPP-21181 | 18205-gl46-hIgG1-wt-Lambda | VH | PRT | SEQ ID NO: 563 |
| TPP-21181 | 18205-gl46-hIgG1-wt-Lambda | HCDR1 | PRT | SEQ ID NO: 564 |
| TPP-21181 | 18205-gl46-hIgG1-wt-Lambda | HCDR2 | PRT | SEQ ID NO: 565 |
| TPP-21181 | 18205-gl46-hIgG1-wt-Lambda | HCDR3 | PRT | SEQ ID NO: 566 |
| TPP-21181 | 18205-gl46-hIgG1-wt-Lambda | VL | PRT | SEQ ID NO: 567 |
| TPP-21181 | 18205-gl46-hIgG1-wt-Lambda | LCDR1 | PRT | SEQ ID NO: 568 |
| TPP-21181 | 18205-gl46-hIgG1-wt-Lambda | LCDR2 | PRT | SEQ ID NO: 569 |
| TPP-21181 | 18205-gl46-hIgG1-wt-Lambda | LCDR3 | PRT | SEQ ID NO: 570 |
| TPP-21181 | 18205-gl46-hIgG1-wt-Lambda | VH | DNA | SEQ ID NO: 571 |
| TPP-21181 | 18205-gl46-hIgG1-wt-Lambda | HCDR1 | DNA | SEQ ID NO: 572 |
| TPP-21181 | 18205-gl46-hIgG1-wt-Lambda | HCDR2 | DNA | SEQ ID NO: 573 |
| TPP-21181 | 18205-gl46-hIgG1-wt-Lambda | HCDR3 | DNA | SEQ ID NO: 574 |
| TPP-21181 | 18205-gl46-hIgG1-wt-Lambda | VL | DNA | SEQ ID NO: 575 |
| TPP-21181 | 18205-gl46-hIgG1-wt-Lambda | LCDR1 | DNA | SEQ ID NO: 576 |
| TPP-21181 | 18205-gl46-hIgG1-wt-Lambda | LCDR2 | DNA | SEQ ID NO: 577 |
| TPP-21181 | 18205-gl46-hIgG1-wt-Lambda | LCDR3 | DNA | SEQ ID NO: 578 |
| TPP-21181 | 18205-gl46-hIgG1-wt-Lambda | HC | PRT | SEQ ID NO: 579 |
| TPP-21181 | 18205-gl46-hIgG1-wt-Lambda | LC | PRT | SEQ ID NO: 580 |
| TPP-21183 | 18205-gl48-hIgG1-wt-Lambda | VH | PRT | SEQ ID NO: 581 |
| TPP-21183 | 18205-gl48-hIgG1-wt-Lambda | HCDR1 | PRT | SEQ ID NO: 582 |
| TPP-21183 | 18205-gl48-hIgG1-wt-Lambda | HCDR2 | PRT | SEQ ID NO: 583 |
| TPP-21183 | 18205-gl48-hIgG1-wt-Lambda | HCDR3 | PRT | SEQ ID NO: 584 |
| TPP-21183 | 18205-gl48-hIgG1-wt-Lambda | VL | PRT | SEQ ID NO: 585 |
| TPP-21183 | 18205-gl48-hIgG1-wt-Lambda | LCDR1 | PRT | SEQ ID NO: 586 |
| TPP-21183 | 18205-gl48-hIgG1-wt-Lambda | LCDR2 | PRT | SEQ ID NO: 587 |
| TPP-21183 | 18205-gl48-hIgG1-wt-Lambda | LCDR3 | PRT | SEQ ID NO: 588 |
| TPP-21183 | 18205-gl48-hIgG1-wt-Lambda | VH | DNA | SEQ ID NO: 589 |
| TPP-21183 | 18205-gl48-hIgG1-wt-Lambda | HCDR1 | DNA | SEQ ID NO: 590 |
| TPP-21183 | 18205-gl48-hlgG1-wt-Lambda | HCDR2 | DNA | SEQ ID NO: 591 |
| TPP-21183 | 18205-gl48-hIgG1-wt-Lambda | HCDR3 | DNA | SEQ ID NO: 592 |
| TPP-21183 | 18205-gl48-hIgG1-wt-Lambda | VL | DNA | SEQ ID NO: 593 |
| TPP-21183 | 18205-gl48-hIgG1-wt-Lambda | LCDR1 | DNA | SEQ ID NO: 594 |
| TPP-21183 | 18205-gl48-hIgG1-wt-Lambda | LCDR2 | DNA | SEQ ID NO: 595 |
| TPP-21183 | 18205-gl48-hIgG1-wt-Lambda | LCDR3 | DNA | SEQ ID NO: 596 |
| TPP-21183 | 18205-gl48-hIgG1-wt-Lambda | HC | PRT | SEQ ID NO: 597 |
| TPP-21183 | 18205-gl48-hIgG1-wt-Lambda | LC | PRT | SEQ ID NO: 598 |
| TPP-21360 | 18206-gl25-gl13-hIgG1Lambda | VH | PRT | SEQ ID NO: 599 |
| TPP-21360 | 18206-gl25-gl13-hIgG1Lambda | HCDR1 | PRT | SEQ ID NO: 600 |
| TPP-21360 | 18206-gl25-gl13-hIgG1Lambda | HCDR2 | PRT | SEQ ID NO: 601 |
| TPP-21360 | 18206-gl25-gl13-hIgG1Lambda | HCDR3 | PRT | SEQ ID NO: 602 |
| TPP-21360 | 18206-gl25-gl13-hIgG1Lambda | VL | PRT | SEQ ID NO: 603 |
| TPP-21360 | 18206-gl25-gl13-hIgG1Lambda | LCDR1 | PRT | SEQ ID NO: 604 |
| TPP-21360 | 18206-gl25-gl13-hIgG1Lambda | LCDR2 | PRT | SEQ ID NO: 605 |
| TPP-21360 | 18206-gl25-gl13-hIgG1Lambda | LCDR3 | PRT | SEQ ID NO: 606 |
| TPP-21360 | 18206-gl25-gl13-hIgG1Lambda | VH | DNA | SEQ ID NO: 607 |
| TPP-21360 | 18206-gl25-gl13-hIgG1Lambda | HCDR1 | DNA | SEQ ID NO: 608 |
| TPP-21360 | 18206-gl25-gl13-hIgG1Lambda | HCDR2 | DNA | SEQ ID NO: 609 |
| TPP-21360 | 18206-gl25-gl13-hIgG1Lambda | HCDR3 | DNA | SEQ ID NO: 610 |
| TPP-21360 | 18206-gl25-gl13-hIgG1Lambda | VL | DNA | SEQ ID NO: 611 |
| TPP-21360 | 18206-gl25-gl13-hIgG1Lambda | LCDR1 | DNA | SEQ ID NO: 612 |
| TPP-21360 | 18206-gl25-gl13-hIgG1Lambda | LCDR2 | DNA | SEQ ID NO: 613 |
| TPP-21360 | 18206-gl25-gl13-hIgG1Lambda | LCDR3 | DNA | SEQ ID NO: 614 |
| TPP-21360 | 18206-gl25-gl13-hIgG1Lambda | HC | PRT | SEQ ID NO: 615 |
| TPP-21360 | 18206-gl25-gl13-hIgG1Lambda | LC | PRT | SEQ ID NO: 616 |
| TPP-23411 | 21360-hIgG1wtlambda | VH | PRT | SEQ ID NO: 617 |
| TPP-23411 | 21360-hIgG1wtlambda | HCDR1 | PRT | SEQ ID NO: 618 |
| TPP-23411 | 21360-hIgG1wtlambda | HCDR2 | PRT | SEQ ID NO: 619 |
| TPP-23411 | 21360-hIgG1wtlambda | HCDR3 | PRT | SEQ ID NO: 620 |
| TPP-23411 | 21360-hIgG1wtlambda | VL | PRT | SEQ ID NO: 621 |
| TPP-23411 | 21360-hIgG1wtlambda | LCDR1 | PRT | SEQ ID NO: 622 |
| TPP-23411 | 21360-hIgG1wtlambda | LCDR2 | PRT | SEQ ID NO: 623 |
| TPP-23411 | 21360-hIgG1wtlambda | LCDR3 | PRT | SEQ ID NO: 624 |
| TPP-23411 | 21360-hIgG1wtlambda | VH | DNA | SEQ ID NO: 625 |
| TPP-23411 | 21360-hIgG1wtlambda | HCDR1 | DNA | SEQ ID NO: 626 |
| TPP-23411 | 21360-hIgG1wtlambda | HCDR2 | DNA | SEQ ID NO: 627 |
| TPP-23411 | 21360-hIgG1wtlambda | HCDR3 | DNA | SEQ ID NO: 628 |
| TPP-23411 | 21360-hIgG1wtlambda | VL | DNA | SEQ ID NO: 629 |
| TPP-23411 | 21360-hIgG1wtlambda | LCDR1 | DNA | SEQ ID NO: 630 |
| TPP-23411 | 21360-hIgG1wtlambda | LCDR2 | DNA | SEQ ID NO: 631 |
| TPP-23411 | 21360-hIgG1wtlambda | LCDR3 | DNA | SEQ ID NO: 632 |
| TPP-23411 | 21360-hIgG1wtlambda | HC | PRT | SEQ ID NO: 633 |
| TPP-23411 | 21360-hIgG1wtlambda | LC | PRT | SEQ ID NO: 634 |
| TPP-29596 | 18206-gl13-gl14-hIgG1wtLambda | VH | PRT | SEQ ID NO: 660 |
| TPP-29596 | 18206-gl13-gl14-hIgG1wtLambda | HCDR1 | PRT | SEQ ID NO: 661 |
| TPP-29596 | 18206-gl13-gl14-hIgG1wtLambda | HCDR2 | PRT | SEQ ID NO: 662 |
| TPP-29596 | 18206-gl13-gl14-hIgG1wtLambda | HCDR3 | PRT | SEQ ID NO: 663 |
| TPP-29596 | 18206-gl13-gl14-hIgG1wtLambda | VL | PRT | SEQ ID NO: 664 |
| TPP-29596 | 18206-gl13-gl14-hIgG1wtLambda | LCDR1 | PRT | SEQ ID NO: 665 |
| TPP-29596 | 18206-gl13-gl14-hIgG1wtLambda | LCDR2 | PRT | SEQ ID NO: 666 |
| TPP-29596 | 18206-gl13-gl14-hIgG1wtLambda | LCDR3 | PRT | SEQ ID NO: 667 |
| TPP-29596 | 18206-gl13-gl14-hIgG1wtLambda | VH | DNA | SEQ ID NO: 668 |
| TPP-29596 | 18206-gl13-gl14-hIgG1wtLambda | HCDR1 | DNA | SEQ ID NO: 669 |
| TPP-29596 | 18206-gl13-gl14-hIgG1wtLambda | HCDR2 | DNA | SEQ ID NO: 670 |
| TPP-29596 | 18206-gl13-gl14-hIgG1wtLambda | HCDR3 | DNA | SEQ ID NO: 671 |
| TPP-29596 | 18206-gl13-gl14-hIgG1wtLambda | VL | DNA | SEQ ID NO: 672 |
| TPP-29596 | 18206-gl13-gl14-hIgG1wtLambda | LCDR1 | DNA | SEQ ID NO: 673 |
| TPP-29596 | 18206-gl13-gl14-hIgG1wtLambda | LCDR2 | DNA | SEQ ID NO: 674 |
| TPP-29596 | 18206-gl13-gl14-hIgG1wtLambda | LCDR3 | DNA | SEQ ID NO: 675 |
| TPP-29596 | 18206-gl13-gl14-hIgG1wtLambda | HC | PRT | SEQ ID NO: 676 |
| TPP-29596 | 18206-gl13-gl14-hIgG1wtLambda | LC | PRT | SEQ ID NO: 677 |
| TPP-29596 | 18206-gl13-gl14-hIgG1wtLambda | HC | DNA | SEQ ID NO: 678 |
| TPP-29596 | 18206-gl13-gl14-hIgG1wtLambda | LC | DNA | SEQ ID NO: 679 |
| TPP-29597 | 18206-gl11-gl25-hIgG1wtLambda | VH | PRT | SEQ ID NO: 680 |
| TPP-29597 | 18206-gl11-gl25-hIgG1wtLambda | HCDR1 | PRT | SEQ ID NO: 681 |
| TPP-29597 | 18206-gl11-gl25-hIgG1wtLambda | HCDR2 | PRT | SEQ ID NO: 682 |
| TPP-29597 | 18206-gl11-gl25-hIgG1wtLambda | HCDR3 | PRT | SEQ ID NO: 683 |
| TPP-29597 | 18206-gl11-gl25-hIgG1wtLambda | VL | PRT | SEQ ID NO: 684 |
| TPP-29597 | 18206-gl11-gl25-hIgG1wtLambda | LCDR1 | PRT | SEQ ID NO: 685 |
| TPP-29597 | 18206-gl11-gl25-hIgG1wtLambda | LCDR2 | PRT | SEQ ID NO: 686 |
| TPP-29597 | 18206-gl11-gl25-hIgG1wtLambda | LCDR3 | PRT | SEQ ID NO: 687 |
| TPP-29597 | 18206-gl11-gl25-hIgG1wtLambda | VH | DNA | SEQ ID NO: 688 |
| TPP-29597 | 18206-gl11-gl25-hIgG1wtLambda | HCDR1 | DNA | SEQ ID NO: 689 |
| TPP-29597 | 18206-gl11-gl25-hIgG1wtLambda | HCDR2 | DNA | SEQ ID NO: 690 |
| TPP-29597 | 18206-gl11-gl25-hIgG1wtLambda | HCDR3 | DNA | SEQ ID NO: 691 |
| TPP-29597 | 18206-gl11-gl25-hIgG1wtLambda | VL | DNA | SEQ ID NO: 692 |
| TPP-29597 | 18206-gl11-gl25-hIgG1wtLambda | LCDR1 | DNA | SEQ ID NO: 693 |
| TPP-29597 | 18206-gl11-gl25-hIgG1wtLambda | LCDR2 | DNA | SEQ ID NO: 694 |
| TPP-29597 | 18206-gl11-gl25-hIgG1wtLambda | LCDR3 | DNA | SEQ ID NO: 695 |
| TPP-29597 | 18206-gl11-gl25-hIgG1wtLambda | HC | PRT | SEQ ID NO: 696 |
| TPP-29597 | 18206-gl11-gl25-hIgG1wtLambda | LC | PRT | SEQ ID NO: 697 |
| TPP-29597 | 18206-gl11-gl25-hIgG1wtLambda | HC | DNA | SEQ ID NO: 698 |
| TPP-29597 | 18206-gl11-gl25-hIgG1wtLambda | LC | DNA | SEQ ID NO: 699 |
| TPP-18206 | 002-F01_497A-M281- P02 + 497A-M317- | HC | DNA | SEQ ID NO: 700 |
| | O07-hlgG1Lambda | | | |
| TPP-18206 | 002-F01_497A-M281- P02 + 497A-M317- | LC | DNA | SEQ ID NO: 701 |
| | O07-hIgG1Lambda | | | |
| TPP-18429 | 18206-gl10-hIgG1Lambda | VH | PRT | SEQ ID NO: 702 |
| TPP-18429 | 18206-gl10-hIgG1Lambda | HCDR1 | PRT | SEQ ID NO: 703 |
| TPP-18429 | 18206-gl10-hIgG1Lambda | HCDR2 | PRT | SEQ ID NO: 704 |
| TPP-18429 | 18206-gl10-hIgG1Lambda | HCDR3 | PRT | SEQ ID NO: 705 |
| TPP-18429 | 18206-gl10-hIgG1Lambda | VL | PRT | SEQ ID NO: 706 |
| TPP-18429 | 18206-gl10-hIgG1Lambda | LCDR1 | PRT | SEQ ID NO: 707 |
| TPP-18429 | 18206-gl10-hIgG1Lambda | LCDR2 | PRT | SEQ ID NO: 708 |
| TPP-18429 | 18206-gl10-hIgG1Lambda | LCDR3 | PRT | SEQ ID NO: 709 |
| TPP-18429 | 18206-gl10-hIgG1Lambda | VH | DNA | SEQ ID NO: 710 |
| TPP-18429 | 18206-gl10-hIgG1Lambda | HCDR1 | DNA | SEQ ID NO: 711 |
| TPP-18429 | 18206-gl10-hIgG1Lambda | HCDR2 | DNA | SEQ ID NO: 712 |
| TPP-18429 | 18206-gl10-hIgG1Lambda | HCDR3 | DNA | SEQ ID NO: 713 |
| TPP-18429 | 18206-gl10-hIgG1Lambda | VL | DNA | SEQ ID NO: 714 |
| TPP-18429 | 18206-gl10-hIgG1Lambda | LCDR1 | DNA | SEQ ID NO: 715 |
| TPP-18429 | 18206-gl10-hIgG1Lambda | LCDR2 | DNA | SEQ ID NO: 716 |
| TPP-18429 | 18206-gl10-hIgG1Lambda | LCDR3 | DNA | SEQ ID NO: 717 |
| TPP-18429 | 18206-gl10-hIgG1Lambda | HC | PRT | SEQ ID NO: 718 |
| TPP-18429 | 18206-gl10-hIgG1Lambda | LC | PRT | SEQ ID NO: 719 |
| TPP-18429 | 18206-gl10-hIgG1Lambda | HC | DNA | SEQ ID NO: 720 |
| TPP-18429 | 18206-gl10-hIgG1Lambda | LC | DNA | SEQ ID NO: 721 |
| TPP-18430 | 18206-gl11-hIgG1Lambda | VH | PRT | SEQ ID NO: 722 |
| TPP-18430 | 18206-gl11-hIgG1Lambda | HCDR1 | PRT | SEQ ID NO: 723 |
| TPP-18430 | 18206-gl11-hIgG1Lambda | HCDR2 | PRT | SEQ ID NO: 724 |
| TPP-18430 | 18206-gl11-hIgG1Lambda | HCDR3 | PRT | SEQ ID NO: 725 |
| TPP-18430 | 18206-gl11-hIgG1Lambda | VL | PRT | SEQ ID NO: 726 |
| TPP-18430 | 18206-gl11-hIgG1Lambda | LCDR1 | PRT | SEQ ID NO: 727 |
| TPP-18430 | 18206-gl11-hIgG1Lambda | LCDR2 | PRT | SEQ ID NO: 728 |
| TPP-18430 | 18206-gl11-hIgG1Lambda | LCDR3 | PRT | SEQ ID NO: 729 |
| TPP-18430 | 18206-gl11-hIgG1Lambda | VH | DNA | SEQ ID NO: 730 |
| TPP-18430 | 18206-gl11-hIgG1Lambda | HCDR1 | DNA | SEQ ID NO: 731 |
| TPP-18430 | 18206-gl11-hIgG1Lambda | HCDR2 | DNA | SEQ ID NO: 732 |
| TPP-18430 | 18206-gl11-hIgG1Lambda | HCDR3 | DNA | SEQ ID NO: 733 |
| TPP-18430 | 18206-gl11-hIgG1Lambda | VL | DNA | SEQ ID NO: 734 |
| TPP-18430 | 18206-gl11-hIgG1Lambda | LCDR1 | DNA | SEQ ID NO: 735 |
| TPP-18430 | 18206-gl11-hIgG1Lambda | LCDR2 | DNA | SEQ ID NO: 736 |
| TPP-18430 | 18206-gl11-hIgG1Lambda | LCDR3 | DNA | SEQ ID NO: 737 |
| TPP-18430 | 18206-gl11-hIgG1Lambda | HC | PRT | SEQ ID NO: 738 |
| TPP-18430 | 18206-gl11-hIgG1Lambda | LC | PRT | SEQ ID NO: 739 |
| TPP-18430 | 18206-gl11-hIgG1Lambda | HC | DNA | SEQ ID NO: 740 |
| TPP-18430 | 18206-gl11-hIgG1Lambda | LC | DNA | SEQ ID NO: 741 |
| TPP-18432 | 18206-gl13-hIgG1Lambda | VH | PRT | SEQ ID NO: 742 |
| TPP-18432 | 18206-gl13-hIgG1Lambda | HCDR1 | PRT | SEQ ID NO: 743 |
| TPP-18432 | 18206-gl13-hIgG1Lambda | HCDR2 | PRT | SEQ ID NO: 744 |
| TPP-18432 | 18206-gl13-hIgG1Lambda | HCDR3 | PRT | SEQ ID NO: 745 |
| TPP-18432 | 18206-gl13-hIgG1Lambda | VL | PRT | SEQ ID NO: 746 |
| TPP-18432 | 18206-gl13-hIgG1Lambda | LCDR1 | PRT | SEQ ID NO: 747 |
| TPP-18432 | 18206-gl13-hIgG1Lambda | LCDR2 | PRT | SEQ ID NO: 748 |
| TPP-18432 | 18206-gl13-hIgG1Lambda | LCDR3 | PRT | SEQ ID NO: 749 |
| TPP-18432 | 18206-gl13-hIgG1Lambda | VH | DNA | SEQ ID NO: 750 |
| TPP-18432 | 18206-gl13-hIgG1Lambda | HCDR1 | DNA | SEQ ID NO: 751 |
| TPP-18432 | 18206-gl13-hIgG1Lambda | HCDR2 | DNA | SEQ ID NO: 752 |
| TPP-18432 | 18206-gl13-hIgG1Lambda | HCDR3 | DNA | SEQ ID NO: 753 |
| TPP-18432 | 18206-gl13-hIgG1Lambda | VL | DNA | SEQ ID NO: 754 |
| TPP-18432 | 18206-gl13-hIgG1Lambda | LCDR1 | DNA | SEQ ID NO: 755 |
| TPP-18432 | 18206-gl13-hIgG1Lambda | LCDR2 | DNA | SEQ ID NO: 756 |
| TPP-18432 | 18206-gl13-hIgG1Lambda | LCDR3 | DNA | SEQ ID NO: 757 |
| TPP-18432 | 18206-gl13-hIgG1Lambda | HC | PRT | SEQ ID NO: 758 |
| TPP-18432 | 18206-gl13-hIgG1Lambda | LC | PRT | SEQ ID NO: 759 |
| TPP-18432 | 18206-gl13-hIgG1Lambda | HC | DNA | SEQ ID NO: 760 |
| TPP-18432 | 18206-gl13-hIgG1Lambda | LC | DNA | SEQ ID NO: 761 |
| TPP-18433 | 18206-gl14-hIgG1Lambda | VH | PRT | SEQ ID NO: 762 |
| TPP-18433 | 18206-gl14-hIgG1Lambda | HCDR1 | PRT | SEQ ID NO: 763 |
| TPP-18433 | 18206-gl14-hIgG1Lambda | HCDR2 | PRT | SEQ ID NO: 764 |
| TPP-18433 | 18206-gl14-hIgG1Lambda | HCDR3 | PRT | SEQ ID NO: 765 |
| TPP-18433 | 18206-gl14-hIgG1Lambda | VL | PRT | SEQ ID NO: 766 |
| TPP-18433 | 18206-gl14-hIgG1Lambda | LCDR1 | PRT | SEQ ID NO: 767 |
| TPP-18433 | 18206-gl14-hIgG1Lambda | LCDR2 | PRT | SEQ ID NO: 768 |
| TPP-18433 | 18206-gl14-hIgG1Lambda | LCDR3 | PRT | SEQ ID NO: 769 |
| TPP-18433 | 18206-gl14-hIgG1Lambda | VH | DNA | SEQ ID NO: 770 |
| TPP-18433 | 18206-gl14-hIgG1Lambda | HCDR1 | DNA | SEQ ID NO: 771 |
| TPP-18433 | 18206-gl14-hIgG1Lambda | HCDR2 | DNA | SEQ ID NO: 772 |
| TPP-18433 | 18206-gl14-hIgG1Lambda | HCDR3 | DNA | SEQ ID NO: 773 |
| TPP-18433 | 18206-gl14-hIgG1Lambda | VL | DNA | SEQ ID NO: 774 |
| TPP-18433 | 18206-gl14-hIgG1Lambda | LCDR1 | DNA | SEQ ID NO: 775 |
| TPP-18433 | 18206-gl14-hIgG1Lambda | LCDR2 | DNA | SEQ ID NO: 776 |
| TPP-18433 | 18206-gl14-hIgG1Lambda | LCDR3 | DNA | SEQ ID NO: 777 |
| TPP-18433 | 18206-gl14-hIgG1Lambda | HC | PRT | SEQ ID NO: 778 |
| TPP-18433 | 18206-gl14-hIgG1Lambda | LC | PRT | SEQ ID NO: 779 |
| TPP-18433 | 18206-gl14-hIgG1Lambda | HC | DNA | SEQ ID NO: 780 |
| TPP-18433 | 18206-gl14-hIgG1Lambda | LC | DNA | SEQ ID NO: 781 |
| TPP-18436 | 18206-gl17-hIgG1Lambda | VH | PRT | SEQ ID NO: 782 |
| TPP-18436 | 18206-gl17-hIgG1Lambda | HCDR1 | PRT | SEQ ID NO: 783 |
| TPP-18436 | 18206-gl17-hIgG1Lambda | HCDR2 | PRT | SEQ ID NO: 784 |
| TPP-18436 | 18206-gl17-hIgG1Lambda | HCDR3 | PRT | SEQ ID NO: 785 |
| TPP-18436 | 18206-gl17-hIgG1Lambda | VL | PRT | SEQ ID NO: 786 |
| TPP-18436 | 18206-gl17-hIgG1Lambda | LCDR1 | PRT | SEQ ID NO: 787 |
| TPP-18436 | 18206-gl17-hIgG1Lambda | LCDR2 | PRT | SEQ ID NO: 788 |
| TPP-18436 | 18206-gl17-hIgG1Lambda | LCDR3 | PRT | SEQ ID NO: 789 |
| TPP-18436 | 18206-gl17-hIgG1Lambda | VH | DNA | SEQ ID NO: 790 |
| TPP-18436 | 18206-gl17-hIgG1Lambda | HCDR1 | DNA | SEQ ID NO: 791 |
| TPP-18436 | 18206-gl17-hIgG1Lambda | HCDR2 | DNA | SEQ ID NO: 792 |
| TPP-18436 | 18206-gl17-hIgG1Lambda | HCDR3 | DNA | SEQ ID NO: 793 |
| TPP-18436 | 18206-gl17-hIgG1Lambda | VL | DNA | SEQ ID NO: 794 |
| TPP-18436 | 18206-gl17-hIgG1Lambda | LCDR1 | DNA | SEQ ID NO: 795 |
| TPP-18436 | 18206-gl17-hIgG1Lambda | LCDR2 | DNA | SEQ ID NO: 796 |
| TPP-18436 | 18206-gl17-hIgG1Lambda | LCDR3 | DNA | SEQ ID NO: 797 |
| TPP-18436 | 18206-gl17-hIgG1Lambda | HC | PRT | SEQ ID NO: 798 |
| TPP-18436 | 18206-gl17-hIgG1Lambda | LC | PRT | SEQ ID NO: 799 |
| TPP-18436 | 18206-gl17-hIgG1Lambda | HC | DNA | SEQ ID NO: 800 |
| TPP-18436 | 18206-gl17-hIgG1Lambda | LC | DNA | SEQ ID NO: 801 |
| TPP-19571 | 18206-gl25-hIgG1Lambda | VH | PRT | SEQ ID NO: 802 |
| TPP-19571 | 18206-gl25-hIgG1Lambda | HCDR1 | PRT | SEQ ID NO: 803 |
| TPP-19571 | 18206-gl25-hIgG1Lambda | HCDR2 | PRT | SEQ ID NO: 804 |
| TPP-19571 | 18206-gl25-hIgG1Lambda | HCDR3 | PRT | SEQ ID NO: 805 |
| TPP-19571 | 18206-gl25-hIgG1Lambda | VL | PRT | SEQ ID NO: 806 |
| TPP-19571 | 18206-gl25-hIgG1Lambda | LCDR1 | PRT | SEQ ID NO: 807 |
| TPP-19571 | 18206-gl25-hIgG1Lambda | LCDR2 | PRT | SEQ ID NO: 808 |
| TPP-19571 | 18206-gl25-hIgG1Lambda | LCDR3 | PRT | SEQ ID NO: 809 |
| TPP-19571 | 18206-gl25-hIgG1Lambda | VH | DNA | SEQ ID NO: 810 |
| TPP-19571 | 18206-gl25-hIgG1Lambda | HCDR1 | DNA | SEQ ID NO: 811 |
| TPP-19571 | 18206-gl25-hIgG1Lambda | HCDR2 | DNA | SEQ ID NO: 812 |
| TPP-19571 | 18206-gl25-hIgG1Lambda | HCDR3 | DNA | SEQ ID NO: 813 |
| TPP-19571 | 18206-gl25-hIgG1Lambda | VL | DNA | SEQ ID NO: 814 |
| TPP-19571 | 18206-gl25-hIgG1Lambda | LCDR1 | DNA | SEQ ID NO: 815 |
| TPP-19571 | 18206-gl25-hIgG1Lambda | LCDR2 | DNA | SEQ ID NO: 816 |
| TPP-19571 | 18206-gl25-hIgG1Lambda | LCDR3 | DNA | SEQ ID NO: 817 |
| TPP-19571 | 18206-gl25-hIgG1Lambda | HC | PRT | SEQ ID NO: 818 |
| TPP-19571 | 18206-gl25-hIgG1Lambda | LC | PRT | SEQ ID NO: 819 |
| TPP-19571 | 18206-gl25-hIgG1Lambda | HC | DNA | SEQ ID NO: 820 |
| TPP-19571 | 18206-gl25-hIgG1Lambda | LC | DNA | SEQ ID NO: 821 |
| TPP-21360 | 18206-gl25-gl13-hIgG1Lambda | HC | DNA | SEQ ID NO: 822 |
| TPP-21360 | 18206-gl25-gl13-hIgG1Lambda | LC | DNA | SEQ ID NO: 823 |
| TPP-23411 | 21360-hIgGllambda | HC | DNA | SEQ ID NO: 824 |
| TPP-23411 | 21360-hIgGllambda | LC | DNA | SEQ ID NO: 825 |
| TPP-27477 | 18206-gl10-gl25-hIgG1Lambda | VH | PRT | SEQ ID NO: 826 |
| TPP-27477 | 18206-gl10-gl25-hIgG1Lambda | HCDR1 | PRT | SEQ ID NO: 827 |
| TPP-27477 | 18206-gl10-gl25-hIgG1Lambda | HCDR2 | PRT | SEQ ID NO: 828 |
| TPP-27477 | 18206-gl10-gl25-hIgG1Lambda | HCDR3 | PRT | SEQ ID NO: 829 |
| TPP-27477 | 18206-gl10-gl25-hIgG1Lambda | VL | PRT | SEQ ID NO: 830 |
| TPP-27477 | 18206-gl10-gl25-hIgG1Lambda | LCDR1 | PRT | SEQ ID NO: 831 |
| TPP-27477 | 18206-gl10-gl25-hIgG1Lambda | LCDR2 | PRT | SEQ ID NO: 832 |
| TPP-27477 | 18206-gl10-gl25-hIgG1Lambda | LCDR3 | PRT | SEQ ID NO: 833 |
| TPP-27477 | 18206-gl10-gl25-hIgG1Lambda | VH | DNA | SEQ ID NO: 834 |
| TPP-27477 | 18206-gl10-gl25-hIgG1Lambda | HCDR1 | DNA | SEQ ID NO: 835 |
| TPP-27477 | 18206-gl10-gl25-hIgG1Lambda | HCDR2 | DNA | SEQ ID NO: 836 |
| TPP-27477 | 18206-gl10-gl25-hIgG1Lambda | HCDR3 | DNA | SEQ ID NO: 837 |
| TPP-27477 | 18206-gl10-gl25-hIgG1Lambda | VL | DNA | SEQ ID NO: 838 |
| TPP-27477 | 18206-gl10-gl25-hIgG1Lambda | LCDR1 | DNA | SEQ ID NO: 839 |
| TPP-27477 | 18206-gl10-gl25-hIgG1Lambda | LCDR2 | DNA | SEQ ID NO: 840 |
| TPP-27477 | 18206-gl10-gl25-hIgG1Lambda | LCDR3 | DNA | SEQ ID NO: 841 |
| TPP-27477 | 18206-gl10-gl25-hIgG1Lambda | HC | PRT | SEQ ID NO: 842 |
| TPP-27477 | 18206-gl10-gl25-hIgG1Lambda | LC | PRT | SEQ ID NO: 843 |
| TPP-27477 | 18206-gl10-gl25-hIgG1Lambda | HC | DNA | SEQ ID NO: 844 |
| TPP-27477 | 18206-gl10-gl25-hIgG1Lambda | LC | DNA | SEQ ID NO: 845 |
| TPP-27478 | 18206-gl11-gl25-hIgG1Lambda | VH | PRT | SEQ ID NO: 846 |
| TPP-27478 | 18206-gl11-gl25-hIgG1Lambda | HCDR1 | PRT | SEQ ID NO: 847 |
| TPP-27478 | 18206-gl11-gl25-hIgG1Lambda | HCDR2 | PRT | SEQ ID NO: 848 |
| TPP-27478 | 18206-gl11-gl25-hIgG1Lambda | HCDR3 | PRT | SEQ ID NO: 849 |
| TPP-27478 | 18206-gl11-gl25-hIgG1Lambda | VL | PRT | SEQ ID NO: 850 |
| TPP-27478 | 18206-gl11-gl25-hIgG1Lambda | LCDR1 | PRT | SEQ ID NO: 851 |
| TPP-27478 | 18206-gl11-gl25-hIgG1Lambda | LCDR2 | PRT | SEQ ID NO: 852 |
| TPP-27478 | 18206-gl11-gl25-hIgG1Lambda | LCDR3 | PRT | SEQ ID NO: 853 |
| TPP-27478 | 18206-gl11-gl25-hIgG1Lambda | VH | DNA | SEQ ID NO: 854 |
| TPP-27478 | 18206-gl11-gl25-hIgG1Lambda | HCDR1 | DNA | SEQ ID NO: 855 |
| TPP-27478 | 18206-gl11-gl25-hIgG1Lambda | HCDR2 | DNA | SEQ ID NO: 856 |
| TPP-27478 | 18206-gl11-gl25-hIgG1Lambda | HCDR3 | DNA | SEQ ID NO: 857 |
| TPP-27478 | 18206-gl11-gl25-hIgG1Lambda | VL | DNA | SEQ ID NO: 858 |
| TPP-27478 | 18206-gl11-gl25-hIgG1Lambda | LCDR1 | DNA | SEQ ID NO: 859 |
| TPP-27478 | 18206-gl11-gl25-hIgG1Lambda | LCDR2 | DNA | SEQ ID NO: 860 |
| TPP-27478 | 18206-gl11-gl25-hIgG1Lambda | LCDR3 | DNA | SEQ ID NO: 861 |
| TPP-27478 | 18206-gl11-gl25-hIgG1Lambda | HC | PRT | SEQ ID NO: 862 |
| TPP-27478 | 18206-gl11-gl25-hIgG1Lambda | LC | PRT | SEQ ID NO: 863 |
| TPP-27478 | 18206-gl11-gl25-hIgG1Lambda | HC | DNA | SEQ ID NO: 864 |
| TPP-27478 | 18206-gl11-gl25-hIgG1Lambda | LC | DNA | SEQ ID NO: 865 |
| TPP-27479 | 18206-gl13-gl14-hIgG1Lambda | VH | PRT | SEQ ID NO: 866 |
| TPP-27479 | 18206-gl13-gl14-hIgG1Lambda | HCDR1 | PRT | SEQ ID NO: 867 |
| TPP-27479 | 18206-gl13-gl14-hIgG1Lambda | HCDR2 | PRT | SEQ ID NO: 868 |
| TPP-27479 | 18206-gl13-gl14-hIgG1Lambda | HCDR3 | PRT | SEQ ID NO: 869 |
| TPP-27479 | 18206-gl13-gl14-hIgG1Lambda | VL | PRT | SEQ ID NO: 870 |
| TPP-27479 | 18206-gl13-gl14-hIgG1Lambda | LCDR1 | PRT | SEQ ID NO: 871 |
| TPP-27479 | 18206-gl13-gl14-hIgG1Lambda | LCDR2 | PRT | SEQ ID NO: 872 |
| TPP-27479 | 18206-gl13-gl14-hIgG1Lambda | LCDR3 | PRT | SEQ ID NO: 873 |
| TPP-27479 | 18206-gl13-gl14-hIgG1Lambda | VH | DNA | SEQ ID NO: 874 |
| TPP-27479 | 18206-gl13-gl14-hIgG1Lambda | HCDR1 | DNA | SEQ ID NO: 875 |
| TPP-27479 | 18206-gl13-gl14-hIgG1Lambda | HCDR2 | DNA | SEQ ID NO: 876 |
| TPP-27479 | 18206-gl13-gl14-hIgG1Lambda | HCDR3 | DNA | SEQ ID NO: 877 |
| TPP-27479 | 18206-gl13-gl14-hIgG1Lambda | VL | DNA | SEQ ID NO: 878 |
| TPP-27479 | 18206-gl13-gl14-hIgG1Lambda | LCDR1 | DNA | SEQ ID NO: 879 |
| TPP-27479 | 18206-gl13-gl14-hIgG1Lambda | LCDR2 | DNA | SEQ ID NO: 880 |
| TPP-27479 | 18206-gl13-gl14-hIgG1Lambda | LCDR3 | DNA | SEQ ID NO: 881 |
| TPP-27479 | 18206-gl13-gl14-hIgG1Lambda | HC | PRT | SEQ ID NO: 882 |
| TPP-27479 | 18206-gl13-gl14-hIgG1Lambda | LC | PRT | SEQ ID NO: 883 |
| TPP-27479 | 18206-gl13-gl14-hIgG1Lambda | HC | DNA | SEQ ID NO: 884 |
| TPP-27479 | 18206-gl13-gl14-hIgG1Lambda | LC | DNA | SEQ ID NO: 885 |
| TPP-27480 | 18206-gl13-gl20-hIgG1Lambda | VH | PRT | SEQ ID NO: 886 |
| TPP-27480 | 18206-gl13-gl20-hIgG1Lambda | HCDR1 | PRT | SEQ ID NO: 887 |
| TPP-27480 | 18206-gl13-gl20-hIgG1Lambda | HCDR2 | PRT | SEQ ID NO: 888 |
| TPP-27480 | 18206-gl13-gl20-hIgG1Lambda | HCDR3 | PRT | SEQ ID NO: 889 |
| TPP-27480 | 18206-gl13-gl20-hIgG1Lambda | VL | PRT | SEQ ID NO: 890 |
| TPP-27480 | 18206-gl13-gl20-hIgG1Lambda | LCDR1 | PRT | SEQ ID NO: 891 |
| TPP-27480 | 18206-gl13-gl20-hIgG1Lambda | LCDR2 | PRT | SEQ ID NO: 892 |
| TPP-27480 | 18206-gl13-gl20-hIgG1Lambda | LCDR3 | PRT | SEQ ID NO: 893 |
| TPP-27480 | 18206-gl13-gl20-hIgG1Lambda | VH | DNA | SEQ ID NO: 894 |
| TPP-27480 | 18206-gl13-gl20-hIgG1Lambda | HCDR1 | DNA | SEQ ID NO: 895 |
| TPP-27480 | 18206-gl13-gl20-hIgG1Lambda | HCDR2 | DNA | SEQ ID NO: 896 |
| TPP-27480 | 18206-gl13-gl20-hIgG1Lambda | HCDR3 | DNA | SEQ ID NO: 897 |
| TPP-27480 | 18206-gl13-gl20-hIgG1Lambda | VL | DNA | SEQ ID NO: 898 |
| TPP-27480 | 18206-gl13-gl20-hIgG1Lambda | LCDR1 | DNA | SEQ ID NO: 899 |
| TPP-27480 | 18206-gl13-gl20-hIgG1Lambda | LCDR2 | DNA | SEQ ID NO: 900 |
| TPP-27480 | 18206-gl13-gl20-hIgG1Lambda | LCDR3 | DNA | SEQ ID NO: 901 |
| TPP-27480 | 18206-gl13-gl20-hIgG1Lambda | HC | PRT | SEQ ID NO: 902 |
| TPP-27480 | 18206-gl13-gl20-hIgG1Lambda | LC | PRT | SEQ ID NO: 903 |
| TPP-27480 | 18206-gl13-gl20-hIgG1Lambda | HC | DNA | SEQ ID NO: 904 |
| TPP-27480 | 18206-gl13-gl20-hIgG1Lambda | LC | DNA | SEQ ID NO: 905 |
| TPP-29367 | 18206-hIgG1wtLambda | VH | PRT | SEQ ID NO: 906 |
| TPP-29367 | 18206-hIgG1wtLambda | HCDR1 | PRT | SEQ ID NO: 907 |
| TPP-29367 | 18206-hIgG1wtLambda | HCDR2 | PRT | SEQ ID NO: 908 |
| TPP-29367 | 18206-hIgG1wtLambda | HCDR3 | PRT | SEQ ID NO: 909 |
| TPP-29367 | 18206-hIgG1wtLambda | VL | PRT | SEQ ID NO: 910 |
| TPP-29367 | 18206-hIgG1wtLambda | LCDR1 | PRT | SEQ ID NO: 911 |
| TPP-29367 | 18206-hIgG1wtLambda | LCDR2 | PRT | SEQ ID NO: 912 |
| TPP-29367 | 18206-hIgG1wtLambda | LCDR3 | PRT | SEQ ID NO: 913 |
| TPP-29367 | 18206-hIgG1wtLambda | VH | DNA | SEQ ID NO: 914 |
| TPP-29367 | 18206-hIgG1wtLambda | HCDR1 | DNA | SEQ ID NO: 915 |
| TPP-29367 | 18206-hIgG1wtLambda | HCDR2 | DNA | SEQ ID NO: 916 |
| TPP-29367 | 18206-hIgG1wtLambda | HCDR3 | DNA | SEQ ID NO: 917 |
| TPP-29367 | 18206-hIgG1wtLambda | VL | DNA | SEQ ID NO: 918 |
| TPP-29367 | 18206-hIgG1wtLambda | LCDR1 | DNA | SEQ ID NO: 919 |
| TPP-29367 | 18206-hIgG1wtLambda | LCDR2 | DNA | SEQ ID NO: 920 |
| TPP-29367 | 18206-hIgG1wtLambda | LCDR3 | DNA | SEQ ID NO: 921 |
| TPP-29367 | 18206-hIgG1wtLambda | HC | PRT | SEQ ID NO: 922 |
| TPP-29367 | 18206-hIgG1wtLambda | LC | PRT | SEQ ID NO: 923 |
| TPP-29367 | 18206-hIgG1wtLambda | HC | DNA | SEQ ID NO: 924 |
| TPP-29367 | 18206-hIgG1wtLambda | LC | DNA | SEQ ID NO: 925 |
| TPP-29368 | 18432-hIgG1wtLambda | VH | PRT | SEQ ID NO: 926 |
| TPP-29368 | 18432-hIgG1wtLambda | HCDR1 | PRT | SEQ ID NO: 927 |
| TPP-29368 | 18432-hIgG1wtLambda | HCDR2 | PRT | SEQ ID NO: 928 |
| TPP-29368 | 18432-hIgG1wtLambda | HCDR3 | PRT | SEQ ID NO: 929 |
| TPP-29368 | 18432-hIgG1wtLambda | VL | PRT | SEQ ID NO: 930 |
| TPP-29368 | 18432-hIgG1wtLambda | LCDR1 | PRT | SEQ ID NO: 931 |
| TPP-29368 | 18432-hIgG1wtLambda | LCDR2 | PRT | SEQ ID NO: 932 |
| TPP-29368 | 18432-hIgG1wtLambda | LCDR3 | PRT | SEQ ID NO: 933 |
| TPP-29368 | 18432-hIgG1wtLambda | VH | DNA | SEQ ID NO: 934 |
| TPP-29368 | 18432-hIgG1wtLambda | HCDR1 | DNA | SEQ ID NO: 935 |
| TPP-29368 | 18432-hIgG1wtLambda | HCDR2 | DNA | SEQ ID NO: 936 |
| TPP-29368 | 18432-hIgG1wtLambda | HCDR3 | DNA | SEQ ID NO: 937 |
| TPP-29368 | 18432-hIgG1wtLambda | VL | DNA | SEQ ID NO: 938 |
| TPP-29368 | 18432-hIgG1wtLambda | LCDR1 | DNA | SEQ ID NO: 939 |
| TPP-29368 | 18432-hIgG1wtLambda | LCDR2 | DNA | SEQ ID NO: 940 |
| TPP-29368 | 18432-hIgG1wtLambda | LCDR3 | DNA | SEQ ID NO: 941 |
| TPP-29368 | 18432-hIgG1wtLambda | HC | PRT | SEQ ID NO: 942 |
| TPP-29368 | 18432-hIgG1wtLambda | LC | PRT | SEQ ID NO: 943 |
| TPP-29368 | 18432-hIgG1wtLambda | HC | DNA | SEQ ID NO: 944 |
| TPP-29368 | 18432-hIgG1wtLambda | LC | DNA | SEQ ID NO: 945 |
| TPP-29369 | 19571-hIgG1wtlambda | VH | PRT | SEQ ID NO: 946 |
| TPP-29369 | 19571-hIgG1wtlambda | HCDR1 | PRT | SEQ ID NO: 947 |
| TPP-29369 | 19571-hIgG1wtlambda | HCDR2 | PRT | SEQ ID NO: 948 |
| TPP-29369 | 19571-hIgG1wtlambda | HCDR3 | PRT | SEQ ID NO: 949 |
| TPP-29369 | 19571-hIgG1wtlambda | VL | PRT | SEQ ID NO: 950 |
| TPP-29369 | 19571-hIgG1wtlambda | LCDR1 | PRT | SEQ ID NO: 951 |
| TPP-29369 | 19571-hIgG1wtlambda | LCDR2 | PRT | SEQ ID NO: 952 |
| TPP-29369 | 19571-hIgG1wtlambda | LCDR3 | PRT | SEQ ID NO: 953 |
| TPP-29369 | 19571-hIgG1wtlambda | VH | DNA | SEQ ID NO: 954 |
| TPP-29369 | 19571-hIgG1wtlambda | HCDR1 | DNA | SEQ ID NO: 955 |
| TPP-29369 | 19571-hIgG1wtlambda | HCDR2 | DNA | SEQ ID NO: 956 |
| TPP-29369 | 19571-hIgG1wtlambda | HCDR3 | DNA | SEQ ID NO: 957 |
| TPP-29369 | 19571-hIgG1wtlambda | VL | DNA | SEQ ID NO: 958 |
| TPP-29369 | 19571-hIgG1wtlambda | LCDR1 | DNA | SEQ ID NO: 959 |
| TPP-29369 | 19571-hIgG1wtlambda | LCDR2 | DNA | SEQ ID NO: 960 |
| TPP-29369 | 19571-hIgG1wtlambda | LCDR3 | DNA | SEQ ID NO: 961 |
| TPP-29369 | 19571-hIgG1wtlambda | HC | PRT | SEQ ID NO: 962 |
| TPP-29369 | 19571-hIgG1wtlambda | LC | PRT | SEQ ID NO: 963 |
| TPP-29369 | 19571-hIgG1wtlambda | HC | DNA | SEQ ID NO: 964 |
| TPP-29369 | 19571-hIgG1wtlambda | LC | DNA | SEQ ID NO: 965 |

### Definitions

[0152] Unless otherwise defined, all scientific and technical terms used in the description, figures and claims have their ordinary meaning as commonly understood by one of ordinary skill in the art. All publications, patent applications, patents, and other references mentioned herein are incorporated by reference in their entirety. In case of conflict, the present specification, including definitions, will prevail. If two or more documents incorporated by reference include conflicting and/or inconsistent disclosure with respect to each other, then the document having the later effective date shall control. Where reference to a database is made, the effective data shall be the version number applicable 26.05.2021, if not indicated otherwise. The materials, methods, and examples are illustrative only and are not intended to be limiting. Unless stated otherwise, the following terms used in this document, including the description and claims, have the definitions given below.

[0153] The expression “about” or “—” as used herein refers to a value being within an acceptable error range for the particular value as determined by one of ordinary skill in the art, which will depend in part on how the value is measured or determined, i.e., on the limitations of the measurement system. For example, “about” can mean within 1 or more than 1 standard deviation, per the practice in the art. The term “about” is also used to indicate that the amount or value in question may be the value designated or some other value that is approximately the same. The phrase is intended to convey that similar values promote equivalent results or effects as described herein. In this context “about” may refer to a range above and/or below of up to 10%. Wherever the term “about” is specified for a certain assay or embodiment, that definition prevails for the particular context.

[0154] The terms “comprising”, “including”, “containing”, “having” etc. shall be read expansively or open-ended and without limitation. The term comprising when used in the specification includes “consisting of”.

[0155] Singular forms such as “a”, “an” or “the” include plural references unless the context clearly indicates otherwise. Thus, for example, reference to “a monoclonal antibody” includes a single monoclonal antibody as well as a plurality of monoclonal antibodies, either the same or different. Likewise reference to “cell” includes a single cell as well as a plurality of cells.

[0156] Unless otherwise indicated, the term “at least” preceding a series of elements is to be understood to refer to every element in the series. The terms “at least one” and “at least one of” include for example, one, two, three, four, five or more elements.

[0157] It is furthermore understood that slight variations above and below a stated range can be used to achieve substantially the same results as a value within the range. Also, unless indicated otherwise, the disclosure of ranges is intended as a continuous range including every value between the minimum and maximum values.

[0158] The term “amino acid” or “amino acid residue” as used herein typically refers to a naturally-occurring amino acid. The one letter code is used herein to refer to the respective amino acid. As used herein, a “charged amino acid” is an amino acid which is negatively charged or positively charged. “Negatively charged amino acids” are aspartic acid (D) and glutamic acid (E). “Positively charged amino acids” are arginine (R) lysine (K) and histidine (H). “Polar amino acids” are all amino acids that form hydrogen bonds as donors or acceptors. These are all charged amino acids and asparagine (N), glutamine (Q), serine (S), threonine (T), tyrosine (Y) and cysteine (C). “Polar uncharged amino acids” are asparagine (N), glutamine (Q), serine (S), threonine (T), tyrosine (Y) and cysteine (C). “Amphiphatic amino acids” are tryptophan (W), tyrosine (Y) and methionine (M). “Aromatic amino acids” are phenylalanine (F), tyrosine (Y), and tryptophan (W). “Hydrophobic amino acids” are glycine (G), alanine (A), valine (V), leucine (L), isoleucine (I), proline (P), phenylalanine (F), methionine (M) and cysteine. “Small amino acids” are glycine (G), alanine (A), serine (S), proline (P), threonine (T), aspartic acid (D) and asparagine (N).

[0159] As used herein, the terms “peptide”, “polypeptide”, and “protein” are used interchangeably, and refer to a compound comprised of amino acid residues covalently linked by peptide bonds. A protein or peptide must contain at least two amino acids, and no limitation is placed on the maximum number of amino acids. Polypeptides include any peptide or protein comprising two or more amino acids joined to each other by peptide bonds. As used herein, the term refers to both short chains, which also commonly are referred to in the art as peptides, oligopeptides and oligomers, for example, and to longer chains, which generally are referred to in the art as proteins, of which there are many types. “Polypeptides” include, for example, biologically active fragments, substantially homologous polypeptides, oligopeptides, homodimers, heterodimers, variants of polypeptides, modified polypeptides, derivatives, analogs, fusion proteins, among others. The polypeptides include natural peptides, recombinant peptides, synthetic peptides, or a combination thereof.

[0160] Where generic reference is made to a gene or protein from a certain species such as mouse, the analogue from human shall likewise be meant, if not stated otherwise or obviously incompatible. This holds in particular in the context of biomarkers.

[0161] The term “isolated” when applied to a nucleic acid, polypeptide, protein or antibody, denotes that the nucleic acid, polypeptide, protein or antibody is essentially free of other cellular components with which it is associated in the natural state. It is preferably in a homogeneous state. It can be in either a dry or aqueous solution. Purity and homogeneity are typically determined using analytical chemistry techniques such as polyacrylamide gel electrophoresis or high-performance liquid chromatography. A protein, polypeptide or antibody that is the predominant species present in a preparation is substantially purified. In particular, an isolated gene is separated from open reading frames that flank the gene and encode a protein other than the gene of interest. An isolated polypeptide may however be immobilized, e.g. on beads or particles, e.g. via a suitable linker.

[0162] The term “purified” denotes that a nucleic acid or protein gives rise to essentially one band in an electrophoretic gel. Particularly, it means that the nucleic acid or protein is at least 85% pure, more preferably at least 95% pure, and most preferably at least 99% pure.

[0163] As used herein, the term “synthetic”, with reference to, for example, a synthetic nucleic acid molecule or a synthetic gene or a synthetic peptide refers to a nucleic acid molecule or polypeptide molecule that is produced by recombinant methods and/or by chemical synthesis methods. As used herein, production by recombinant means by using recombinant DNA methods means the use of the well-known methods of molecular biology for expressing proteins encoded by cloned DNA.

[0164] “Post-translational modification(s)” (PTM) refer to the covalent modification(s) of peptides or proteins, which are introduced following protein biosynthesis under natural conditions. The term includes without limitation glycosylation, phosphorylation, acylation, adenylation, farnesylation, ubiquitination, and sulfation. Post-translational modifications may influence the activity of peptides or proteins. In 2004, Gutierrez et al. have described the sulfation and glycosylation state of the murine CCR8 chemokine receptor, and the way in which these post-translational modifications affect CCR8 activity. They suggest that tyrosines at positions 14 and 15 in mouse CCR8 are sulfated amino acid residues, whereas asparagine 8 and threonines 10 and 12 are glycosylated. Furthermore, they show that the sulfations are important for the activity of CCR8 (Gutiérrez, Julio, et al. “Analysis of post-translational CCR8 modifications and their influence on receptor activity.” Journal of Biological Chemistry 279.15 (2004): 14726-14733).

[0165] A “sulfation” is a posttranslational modification where a sulfate group is added to an amino acid such as a tyrosine residue of a polypeptide or protein. Tyrosine sulfation occurs in all multicellular organisms. Under physiological conditions it is catalyzed by tyrosylprotein sulfotransferases (TPSTs) 1 and 2, Golgi-resident enzymes which transfer sulfate from the cofactor PAPS (3′-phosphoadenosine 5′-phosphosulfate) to a context-dependent tyrosine in a protein substrate. Synthetic sulfation of tyrosine may be performed with a technique known in the art, e.g. as described in Bunschoten, Anton, et al. “A general sequence independent solid phase method for the site specific synthesis of multiple sulfated-tyrosine containing peptides.” Chemical Communications 21 (2009): 2999-3001. A sulfated polypeptide is a polypeptide comprising at least one sulfation. A non-sulfated polypeptide is a polypeptide comprising no sulfation.

[0166] A “tyrosine rich domain” (TRD) is a conserved domain which characterizes seven transmembrane proteins such as CXC and CC chemokine receptors. The TRD is typically located at the N terminus of the chemokine receptor and is typically linked to a LID domain via a cysteine, cf. FIG. 2b. Thus, as used herein, the term TRD refers to the amino acid or protein sequence of a CXC or CC chemokine receptor which is located N terminal of the first cysteine counted from the N terminus. The TRD may or may not comprise a signal peptide. The TRD may or may not be modified. Besides tyrosine, a TRD often comprises negatively charged amino acid residues such as aspartic acid. TRDs have been proposed to be important structures for the interaction of chemokine receptors with their endogenous ligands. Under physiological conditions, the tyrosine residues in a TRD can be sulfated, non-sulfated or partially sulfated. The specific sequences for the TRDs of the respective chemokine receptors are provided in Table 4.1. However, it is obvious that mutations may be introduced in the TRD sequence without changing the overall charge and interaction pattern. Preferably, a TRD has at least a 90%, 95% or 99% sequence identity or sequence similarity with at least one TRD sequence according to Table 4.1.

[0167] The term “N terminus” or “N term” of a chemokine receptor as used herein refers to the N terminal amino acids of the chemokine receptor comprising at least the TRD. Where a polypeptide or protein comprises a signal peptide, the N terminus may also refer to the N terminal sequence behind the natural cleavage site of the polypeptide or protein. According to some preferred embodiments, the N terminus comprises the LID domain and the TRD domain of a chemokine receptor but does not comprise the natural cysteine between these two domains. Instead, the cysteine can be removed or can be replaced by a different amino acid.

[0168] The “LID” domain of a chemokine receptor as used herein refers to an amino acid sequence located C terminal of the TRD of the chemokine receptor. TRD and LID domain are typically separated by a single cysteine.

[0169] “Sequence identity” or “percent identity” is a number that describes how similar a query sequence is to a target sequence, more precisely how many characters in each sequence are identical after alignment. The most popular tool to calculate sequence identity is BLAST (basic local alignment search tool, blast.ncbi.nlm.nih.gov/), which performs comparisons between pairs of sequences, searching for regions of local similarity. Suitable alignment methods are known in the art, e.g. Needleman-Wunsch algorithm for global-global alignment, using BLOSUM62 matrix, with gap opening penalty of 11 and a gap extension penalty of 1. Afterwards, the pairs of aligned identical residues can be counted and then divided by the total length of the alignment (including gaps, internal as well as external) to arrive at the percent identity value.

[0170] For “percent similarity” or “sequence similarity” values, the same approach as for percent identity values can be used, except that what is counted, instead of pairs of identical residues, is the aligned residue pairs with BLOSUM62 values that are not negative (i.e., ≥0).

[0171] “Seven transmembrane receptors” (7-TM receptors) are integral membrane proteins that contain seven membrane-spanning helices. As used herein, 7-TM receptors are G protein-coupled receptors.

[0172] “Chemokine receptors” are seven transmembrane receptors. The chemokine receptor family contains 24 members in humans and can be subdivided, based on the class of chemokines they bind, into four subfamilies: CX3CR, CXCR, CCR, and XCR, all of them activating G proteins, and ACKR, containing 6 atypical receptors, unable to activate G proteins upon ligand binding.

[0173] “CXC chemokine receptors” (CXCR) are integral membrane proteins that specifically bind and respond to cytokines of the CXC chemokine family. They represent one subfamily of chemokine receptors, a large family of G protein-linked receptors that are known as seven transmembrane (7-TM) proteins, since they span the cell membrane seven times. There are currently seven known CXC chemokine receptors in mammals, named CXCR1, CXCR2, CXCR3, CXCR4, CXCR5, and CXCR6. CXCR6 is more closely related in structure to CC chemokine receptors than to other CXC chemokine receptors.

[0174] “CC chemokine receptors” (CCR, also beta chemokine receptors) are integral membrane proteins that specifically bind and respond to cytokines of the CC chemokine family. They represent one subfamily of chemokine receptors, a large family of G protein-linked receptors that are known as seven transmembrane (7-TM) proteins since they span the cell membrane seven times. The subfamily of the CC chemokine receptors comprises CCR1, CCR2, CCR3, CCR4, CCR5, CCR6, CCR7, CCR8, CCR9 and CCR10.

[0175] The term “CCR8” refers to the C-C chemokine receptor type 8. The CCR8 protein is encoded by the gene CCR8 (NCBI gene ID 1237). Synonyms for CCR8 are inter alia CC-CKR-8, CCR-8, CDw198, CKRL1, CMKBR8, CMKBRL2, GPRCY6, CY6, TER1. The CCR8 protein comprises human, murine, rat, rhesus macaque and further mammalian and non-mammalian homologues. Sequence(s) for human CCR8 are accessible via UniProt Identifier P51685 (CCR8_HUMAN), for instance human isoform P51685-1 or P51685-2 (UniProt, Nov. 29, 2019). Sequence(s) for murine CCR8 are accessible via UniProt Identifier P56484 (CCR8_MOUSE). Sequence(s) for Rhesus macaque CCR8 are accessible via UniProt Identifier 097665 (CCR8_MACMU). Different isoforms and variants may exist for the different species and are all comprised by the term CCR8. Also comprised are CCR8 molecules before and after maturation, i.e., independent of cleavage of one or more pro-domains. In addition, synthetic variants of the CCR8 protein may be generated and are comprised by the term CCR8. The protein CCR8 may furthermore be subject to various modifications, e.g, synthetic or naturally occurring modifications, such as post translational modifications. Recombinant human CCR8 is commercially available or can be manufactured as known in the art. CCR8 is a receptor for the chemokine CCL1/SCYA1/I-309. Barington et al. have reported the importance of conserved extracellular disulfide bridges and aromatic residues in extracellular loop 2 (ECL-2) for ligand binding and activation in the chemokine receptor CCR8 (Barington, Line, et al. “Role of conserved disulfide bridges and aromatic residues in extracellular loop 2 of chemokine receptor CCR8 for chemokine and small molecule binding.” Journal of Biological Chemistry 291.31 (2016): 16208-16220). Furthermore, they found that two distinct aromatic residues in ECL-2, Tyr184 (Cys+1) and Tyr187 (Cys+4), were crucial for binding of the CC chemokines CCL1 (agonist) and MC148 (antagonist), respectively, but not for small molecule binding.

[0176] “Programmed Death-1 (PD-1)” refers to an immunoinhibitory receptor belonging to the CD28 family. PD-1 is expressed predominantly on previously activated T cells in vivo and binds to two ligands, PD-L1 and PD-L2. The term “PD-1” as used herein includes without limitation human PD-1 (hPD-1), variants, isoforms, and species homologs of hPD-1, and analogs having at least one common epitope with hPD-1. The complete hPD-1 sequence can be found under GenBank Accession No. U64863 (Nov. 29, 2019).

[0177] “Programmed Death Ligand-1 (PD-L1)” is one of two cell surface glycoprotein ligands for PD-1 (the other being PD-L2) that down regulate T cell activation and cytokine secretion upon binding to PD-1. The term “PD-L1” as used herein includes without limitation human PD-L1 (hPDL1), variants, isoforms, and species homologs of hPD-L1, and analogs having at least one common epitope with hPD-L1. The complete hPD-L1 sequence can be found under GenBank Accession No. Q9NZQ7 (Nov. 29, 2019). “Tumor Proportion Score” (TPS) is the percentage of viable tumor cells showing partial or complete membrane staining at any intensity. For example, a specimen should be considered to have PD-L1 expression if TPS≥1% and high PDL1 expression if TPS≥50%. For example, PD-L1 protein expression in NSCLC is usually determined by using Tumor Proportion Score (TPS).

[0178] “Combined Positive Score” (CPS) is the number of staining cells (tumor cells, lymphocytes, macrophages) divided by the total number of viable tumor cells, multiplied by 100. For example, a specimen should be considered to have PD-L1 expression if CPS≥1 and to have high PD-L1 expression if CPS≥10. The FDA has approved the use of the PD-L1 IHC 22C3 pharmDx assay to determine a patient's eligibility for therapeutic antibody pembrolizumab.

[0179] “FOXP3” is a 50-55 kD transcription factor, also known as Forkhead box protein P3, Scurfin, JM2, or IPEX. It is proposed to be a master regulatory gene and more specific marker of T regulatory cells than most cell surface markers. Transduced expression of FOXP3 in CD4+/CD25− cells has been shown to induce GITR, CD103, and CTLA4 and impart a T regulatory cell phenotype. Biolegend antibody clones 206D and 259D recognize a human FOXP3 epitope in the region of amino acids 105-235. Poly6238 recognizes both human and mouse FOXP3 and was raised against the N-terminal portion of FOXP3.

[0180] The term “modulation” refers to any alteration of an existing process or behavior, such as blocking (antagonism) and induction (agonism). For example, modulation of G protein independent signaling refers to any significant alteration of G-protein independent signaling.

[0181] The term “internalization” of an antibody, fragment or conjugate refers to the uptake of the antibody, fragment or conjugate into a cell. Preferably, internalization is determined for a cell line with endogenous target expression, e.g. as described elsewhere herein for human or murine CCR8. Preferably, internalization is determined by measuring total internalized fluorescence intensity per cell and is quantified relative to an isotype control, e.g. as described in example 10.5. In brief, the antibody, fragment or conjugate and a matching isotype control are labeled with a dye and internalized fluorescence is determined and quantified for the antibody, fragment or conjugate relative to the isotype control. A “non-internalizing antibody” is defined as an antibody showing substantially the same internalization as a corresponding isotype control. A “low internalizing antibody” is defined as an antibody showing an internalization which is equal to or lower than the 10-fold of the internalization of the isotype control, preferably lower than the 9-, 8-, 7-, 6-, 5-, 4-, 3-, 2-, 1.5-, 1.4-, 1.3-, 1.2-, or 1.1-fold of the internalization of the isotype control. A “medium internalizing antibody” is defined as an antibody showing an internalization which is equal to or lower than the 21-fold of the internalization of the isotype control and higher than the 10-fold of the internalization of the isotype control. A “high internalizing antibody” is defined as an antibody showing an internalization which is higher than the 21-fold of the internalization of the isotype control.

[0182] In the alternative, internalization can furthermore be quantified based on t(1/2), i.e. as time until half of the amount of antibody, fragment or conjugate has been internalized. Preferably, antibodies according to the current invention are characterized by a time until half of the amount of antibody, fragment or conjugate has been internalized which is >2 hours, preferably >4, >5, >6, >7, >8, >9, >10, >11, >12,>13,>14,>15,>16,>17,>18,>19, >20, >21, >22, >23, >24, >26, >28, >30, or >48 hours. Most preferably, antibodies according to the current invention are not internalized at all, i.e., no time can be defined until which half of the amount of antibody, fragment or conjugate has been internalized.

[0183] An “isotype control” is an antibody or fragment that does not bind a target but has the same class and type as the reference antibody or fragment recognizing the target.

[0184] An antibody or fragment is termed “cross-reactive” or “cross reactive” if the antibody or fragment binds an antigen from two or more different species, e.g. with a KD value of 10-7 M or less, more preferably of less than 10-8 M, even more preferably in the range from 10-9 M to 10-11 M.

[0185] By the term “specifically binds” as used herein with respect to an antibody, is meant an antibody which recognizes a specific antigen, but does not substantially recognize or bind other molecules in a sample: An antibody characterized by substantial unspecific binding would lack therapeutic applicability, such that these embodiments are excluded. However, as known in the art, specific binding of an antibody or binder does not necessarily exclude an antibody or binder binding to further antigens/target molecules. An antibody that specifically binds to an antigen from one species may also bind to that antigen from one or more further species. Such cross-species reactivity does not itself alter the classification of an antibody as specific.

[0186] In some instances, the terms “specific binding” or “specifically binding” can be used in reference to the interaction of an antibody, a protein, or a peptide with a second chemical species, to mean that the interaction is dependent upon the presence of a particular structure (e.g., an antigenic determinant or epitope) on the chemical species; for example, an antibody recognizes and binds to a specific protein structure rather than to proteins generally. If an antibody is specific for epitope “A”, the presence of a molecule containing epitope A (or free, unlabeled A), in a reaction containing labeled “A” and the antibody, will reduce the amount of labeled A bound to the antibody.

[0187] In case of doubt, specific binding of an antibody or binder preferably describes binding of an antibody, antibody fragment or binder to its antigen/target with an affinity of at least 10-7 M (as KD value; i.e. preferably those with KD values smaller than 10-7 M), with the antibody or binder having an at least two times lower affinity for a non-specific antigen which is not the predetermined antigen/target molecule or a closely related antigen/target molecule.

[0188] “Polyspecificity”, also “polyreactivity” or “unspecific binding” refers to the binders' or antibodies' ability to bind a defined set of unrelated antigens. Unspecific binding is substantial, if the (therapeutic) applicability of the antibody is compromised. Polyspecificity for non-protein structures including without limitation target negative cell lines or tissues, baculo virus particle (BVP), insulin or DNA, may be evaluated as known in the art and as described herein. For example, unspecific binding to target negative human cell lines can be determined e.g. by FACS analysis using mock transfected CHO or HEK cells. In a second example, unspecific binding to different tissues can be analyzed by FACS analysis of a cell line or panel of cell lines derived from the respective tissue. In a third example, unspecific binding to immune cell populations can be analyzed by FACS after sorting the immune cell populations as known in the art. In a fourth example, unspecific binding to BVP, insulin or DNA can be analyzed using ELISA, e.g. as described in Hötzel, Isidro, et al. “A strategy for risk mitigation of antibodies with fast clearance.” MAbs. Vol. 4. No. 6. Taylor & Francis, 2012; Avery, Lindsay B., et al. “Establishing in vitro in vivo correlations to screen monoclonal antibodies for physicochemical properties related to favorable human pharmacokinetics.” MAbs. Vol. 10. No. 2. Taylor & Francis, 2018, and Jain, Tushar, et al. “Biophysical properties of the clinical-stage antibody landscape.” Proceedings of the National Academy of Sciences 114.5 (2017): 944-949, incorporated herein in their entirety and in particular with regards to the technical details necessary to analyze and quantify unspecific binding. An antibody without substantial unspecific binding is preferably characterized by an unspecific binding that is lower than unspecific binding of reference antibody Gantenerumab (Roche) and most preferably lower than unspecific binding of reference antibody Remicade (Janssen Biotech).

[0189] The term “off target binding” refers to the ability of an antibody to bind individual proteins different from the intended target, for example proteins of the targets' protein family. Off target binding may be evaluated using commercial assays known in the art such as the Retrogenix off target profiling assay. In brief, antibodies are tested on microarrays containing HEK293 cells individually expressing several thousand human membrane proteins and secreted proteins. Binding of the antibody to a potential off target has to be confirmed by FACS using cells overexpressing the potential off target.

[0190] The term “affinity” is a term of the art and describes the strength of binding between a binder, antibody or antibody fragment and a target. The “affinity” of antibodies and fragments thereof for a target can be determined using techniques well known in the art or described herein, for example by ELISA, isothermal titration calorimetry (ITC), surface plasmon resonance (SPR), flow cytometry or fluorescent polarization assays. Preferably the affinity is provided as dissociation constant KD.

[0191] The “dissociation constant” (KD) has molar units (M) and corresponds to the concentration of the binder/antibody at which half of the target proteins are occupied at equilibrium. The smaller the dissociation constant is, the higher is the affinity between the binder or antibody and its target.

[0192] According to the current invention, the antibodies preferably have a target affinity of at least 10-7 M (as KD value), more preferably of at least 10-8 M, even more preferably in the range from 10-9 M to 10-11 M. The KD values can be preferably determined by means of surface plasmon resonance spectroscopy, e.g. as described elsewhere herein. Where assay conditions were found to influence the determined KD, the assay setup with the least standard deviation shall be used.

[0193] “Half maximal effective concentration” (EC50) refers to the concentration of a drug, antibody, fragment, conjugate or molecule which induces a response halfway between the baseline and maximum after a specified incubation time. In the context of antibody binding, the EC50 thus reflects the antibody concentration needed for half-maximal binding. An EC50 can be determined if an inflection point can be determined by mathematical modeling (e.g., non-linear regression) of the dose—response curve describing the relationship between applied drug, antibody, fragment, conjugate or molecule concentration and signal. For example, if the dose—response curve follows a sigmoidal curve, an EC50 can be determined. Where the response is an inhibition, the EC50 is termed half maximal inhibitory concentration (IC50). EC80 can be determined mutatis mutandis.

[0194] The term “antibody” (Ab) refers to an immunoglobulin molecule (e.g. without limitation human IgG1, IgG2, IgG3, IgG4, IgM, IgD, IgE, IgA1, IgA2, mouse IgG1, IgG2a, IgG2b, IgG2c, IgG3, IgA, IgD, IgE or IgM, rat IgG1, IgG2a, IgG2b, IgG2c, IgA, IgD, IgE or IgM, rabbit IgA1, IgA2, IgA3, IgE, IgG, IgM, goat IgA, IgE, IgG1, IgG2, IgE, IgM or chicken IgY) that specifically binds to, or is immunologically reactive with, a particular antigen. Antibodies or antibody fragments comprise complementarity determining regions (CDRs), also known as hypervariable regions, in both the light chain and heavy chain variable domains. The more highly conserved portions of the variable domains are called the framework (FR). As is known in the art, the amino acid position/boundary delineating a hypervariable region of an antibody can vary, depending on the context and the various definitions known in the art. As used herein, numbering of immunoglobulin amino acid residues is done according to the immunoglobulin amino acid residue numbering system of Kabat et al.. The variable domains of native heavy and light chains each comprise four FR regions. The three CDRs in each chain are held together in close proximity by the FR regions and, with the CDRs from the other chain, contribute to the formation of the antigen binding site of antibodies, see Kabat, E. A., et al. “Sequences of Proteins of Immunological Interest (Natl. Inst. Health, Bethesda, Md.), GPO Publ.” No165-462 (1987). The term antibody as used herein also refers to antibody fragments, except where explicitly stated otherwise. Depending on the respective context, the term antibody may also refer to any proteinaceous binding molecule with immunoglobulin-like function. The term “CDR” refers to the complementary determining region of the antibody. As known in the art complementarity-determining regions (CDRs) are part of the variable chains in antibodies and T cell receptors. A set of CDRs constitutes a paratope. CDRs are crucial to the diversity of antigen specificities. There are three CDRs (CDR1, CDR2 and CDR3), arranged non-consecutively on the amino acid sequence of a variable domain of an antigen receptor. Since the antigen receptors are typically composed of two variable domains (on two different polypeptide chains, heavy and light chain), there are usually six CDRs for each antigen receptor that can collectively come into contact with the antigen. The CDRs of the light chain are LCDR1, LCDR2 and LCDR3. The CDRs of the heavy chain are termed HCDR1, HCDR2 and HCDR3. HCDR3 is the most variable complementary determining region (see, e.g., Chothia, Cyrus, and Arthur M. Lesk. “Canonical structures for the hypervariable regions of immunoglobulins.” Journal of molecular biology 196.4 (1987): 901-917; Kabat, E. A., et al. “Sequences of proteins of immunological interest. Bethesda, Md.: US Department of Health and Human Services.” Public Health Service, National Institutes of Health (1991): 103-511).

[0195] The “constant region” refers to the portion of the antibody molecule that confers effector functions. The heavy chain constant region can be selected from any of the five isotypes: alpha (α), delta (δ), epsilon (ε), gamma (g), or mu (μ).

[0196] The term “Fc domain”, “Fc region” or “Fc part” as used herein refers to a C-terminal region of an antibody heavy chain that contains at least a portion of the constant region. The term includes native sequence Fc regions and variant Fc regions. For example, a human IgG heavy chain Fc region may extend from Cys226, or from Pro230, to the carboxyl-terminus of the heavy chain.

[0197] Antibodies or binding fragments according to the current invention may have been modified to alter at least one constant region-mediated biological effector function. For example, in some embodiments, an antibody may be modified to reduce or enhance at least one constant region-mediated biological effector function relative to the unmodified antibody, e.g., reduced or improved binding to the Fc receptor (FcγR). FcγR binding may be reduced, e.g. by mutating the immunoglobulin constant region segment of the antibody at particular regions necessary for FcγR interactions (see, e.g., Canfield, Stephen M., and Sherie L. Morrison. “The binding affinity of human IgG for its high affinity Fc receptor is determined by multiple amino acids in the CH2 domain and is modulated by the hinge region.” The Journal of experimental medicine 173.6 (1991): 1483-1491; and Lund, John, et al. “Human Fc gamma RI and Fc gamma RII interact with distinct but overlapping sites on human IgG.” The Journal of Immunology 147.8 (1991): 2657-2662). FcγR binding may be enhanced, e.g. by afucosylation. Reducing FcγR binding may also reduce other effector functions which rely on FcγR interactions, such as opsonization, phagocytosis and antigen-dependent cellular cytotoxicity (“ADCC”).

[0198] Furthermore, addressing the interaction of Fc with FcRn allows to modulate the half-life of antibodies in vivo. Abrogating the interaction by e.g. introduction of mutation H435A leads to an extremely short half-life, since the antibody is no longer protected from lysosomal degradation by FcRn recycling. In some preferred embodiments according to all aspects, the antibody according to the current invention comprises mutation H435A or has otherwise been engineered for a reduced half-life.

[0199] In contrast, antibodies comprising “YTE” mutations (M252Y/S254T/T256E) and/or equivalent mutations such as “LS” mutations (M428L/N434S) have been shown to significantly extend the half-life by more efficient recycling from endosomes in both pre-clincal species as well as humans (Dall'Acqua, William F., et al. “Increasing the affinity of a human IgG1 for the neonatal Fc receptor: biological consequences.” The Journal of Immunology 169.9 (2002): 5171-5180; Zalevsky, Jonathan, et al “Enhanced antibody half-life improves in vivo activity.” Nature biotechnology 28.2 (2010): 157-159). In some preferred embodiments according to all aspects, the antibody according to the current invention comprises YTE mutations (M252Y/S254T/T256E) and/or equivalent mutations such as LS (M428L/N434S) or has otherwise been engineered for an improved half-life. Suitable Fc engineering approaches for extension of half-life can be found in Haraya, Kenta, Tatsuhiko Tachibana, and Tomoyuki Igawa. “Improvement of pharmacokinetic properties of therapeutic antibodies by antibody engineering.” Drug metabolism and pharmacokinetics 34.1 (2019): 25-41, and/or Lee, Chang-Han, et al. “An engineered human Fc domain that behaves like a pH-toggle switch for ultra-long circulation persistence.” Nature communications 10.1 (2019): 1-11, both incorporated herein by reference.

[0200] “Afucosylated” antibodies are antibodies engineered such that the oligosaccharides in the Fc region of the antibody do not have any fucose sugar units. Glycosylation of an antibody can alter its function. For example, if glycosylation at N297 in the CH2 domain of an IgG is completely eliminated, binding to FcγRs is lost. However, modulation of the specific carbohydrate composition at N297 can have the opposite effect and enhance the ADCC activity of the antibody. In brief, the affinity of an antibody for the activating FcγRs depends on the composition of the N297 N-linked oligosaccharide. There are 32 different possible combinations of oligosaccharides that can occur at this site. Naturally occurring human IgG and those produced by hybridomas or other common expression systems are usually composed of N-acetylglucosamine (GlcNAc) and three mannose residues that form a core carbohydrate. This core is attached to two additional GlcNAc groups to form biantennary branches. The addition of galactose at each branch can occur as well as the terminal addition of sialic acid to these galactose molecules. Fucose is often part of the core GlcNAc. This fucose, through steric hindrance, obstructs the interaction of the antibody with the FcγRIIIA. Thus, elimination of this fucose molecule while maintaining other forms of glycosylation at this site increases the binding of the antibody to the activating FcγRs, enhancing its ability to elicit ADCC and/or ADCP (Almagro, Juan C., et al. “Progress and challenges in the design and clinical development of antibodies for cancer therapy.” Frontiers in immunology 8 (2018): 1751). Methods of preparing fucose-less antibodies include growth in rat myeloma YB2/0 cells (ATCC CRL 1662). YB2/0 cells express low levels of FUT8 mRNA, which encodes α-1,6-fucosyltransferase, an enzyme necessary for fucosylation of polypeptides. Afucosylated antibodies are preferred for the current invention.

[0201] “Antibody-dependent cellular cytotoxicity” (“ADCC”), also referred to as “antibody-dependent cell-mediated cytotoxicity”, is a mechanism of cell-mediated immune defense whereby an immune cell actively lyses a target cell, whose membrane-surface antigens have been bound by specific antibodies. ADCC is mediated via interaction of the antibody or fragment with FcγRIIIa. In humans, FcγRIII exists in two different forms: FcγRIIIa (CD16a) and FcγRIIIb (CD16b). While FcγRIIIa is expressed on monocytes, neutrophils, mast cells, macrophages, and natural killer cells as a transmembrane receptor, FcγRIIIb is only expressed on neutrophils. These receptors bind to the Fc portion of IgG antibodies, which then activates antibody-dependent cell-mediated cytotoxicity (ADCC) mediated by the human effector cells.

[0202] Different assay systems to determine ADCC induction in human subjects have been described in the literature and are suitable for characterization of the subject matter disclosed herein. For example, Yao-Te Hsieh et al. have studied different ADCC assay systems, namely assays based on (i) natural killer cells from human donors (FcγRIIIA+primary NK), (ii) FcγRIIIA engineered NK-92 cells and (iii) FcγRIIIA/NFAT-RE/luc2 engineered Jurkat T cells (Hsieh, Yao-Te, et al. “Characterization of FcγRIIIA effector cells used in in vitro ADCC bioassay: comparison of primary NK cells with engineered NK-92 and Jurkat T cells.” Journal of Immunological Methods 441 (2017): 56-66, incorporated herein in entirety; in particular, reference is made to the method description for these assays). In brief, all three effector cell systems differentially express FcγRIIIA and provide dose-dependent ADCC pathway activity, yet only primary NK and engineered NK-92 cells are capable of inducing ADCC-mediated cell lysis. For functional assessment of ADCC activity, primary NK or NK-92 (V-158) cells thus better reflect the physiologically relevant ADCC mechanism of action. As an engineered cell line, NK-92 cells may behave more reproducibly than primary NK and is therefore the preferred assay system to determine ADCC response in human subjects, e.g. in case of doubt.

[0203] An antibody or antigen-binding fragment inducing ADCC is an antibody which may elicit a substantial amount of lysis of target cells in the presence of NK effector cells. Preferably, the ADCC induction results in the lysis of at least 2%, 5%, 10%, 15%, 20%, 25%, 30%, 35%, 40%, 45%, 50%, 55%, 60%, 65%, 70%, 75%, 80%, 85%, 90%, 95% or 99% of the target cells.

[0204] “Antibody-dependent cellular phagocytosis” (“ADCP”) is the mechanism by which antibody-opsonized target cells activate the FcγRs on the surface of macrophages to induce phagocytosis, resulting in internalization and degradation of the target cell. For ADCP, binding to macrophages as effector cells typically occurs via the interaction of the antibodies FC part with FcγRIIa (CD32a) expressed by macrophages.

[0205] An antibody or antigen-binding fragment inducing ADCP is an antibody which may elicit a substantial amount of phagocytosis of target cells in the presence of macrophages. Preferably, the ADCP induction results in the phagocytosis of at least 2%, 5%, 10%, 15%, 20%, 25%, 30%, 35%, 40%, 45%, 50%, 55%, 60%, 65%, 70%, 75%, 80%, 85%, 90%, 95% or 99% of the target cells.

[0206] “Complement-dependent cytotoxicity” (“CDC”) is an effector function of IgG and IgM antibodies. When they are bound to a surface antigen on a target cell (e.g. bacterial or viral infected cell), the classical complement pathway is triggered by bonding protein Clq to these antibodies, resulting in formation of a membrane attack complex (MAC) and target cell lysis. Complement system is efficiently activated by human IgG1, IgG3 and IgM antibodies, weakly by IgG2 antibodies and is not activated by IgG4 antibodies. It is one mechanism of action by which therapeutic antibodies—also specific embodiments of the antibodies according to the current invention—can achieve an antitumor effect. Several laboratory methods exist for determining the efficacy of CDC and are known in the art.

[0207] An antibody or antigen-binding fragment inducing CDC is an antibody which may elicit a substantial amount of formation of a membrane attack complex and lysis of target cells. Preferably, the CDC induction results in the lysis of at least 2%, 5%, 10%, 15%, 20%, 25%, 30%, 35%, 40%, 45%, 50%, 55%, 60%, 65%, 70%, 75%, 80%, 85%, 90%, 95% or 99% of the target cells.

[0208] Antibodies comprising an Fc region may or may not comprise a modification promoting the association of the first and the second subunit of the Fc domain.

[0209] A “modification promoting the association of the first and the second subunit of the Fc domain” is a manipulation of the peptide backbone or the post-translational modifications of an Fc domain subunit that reduces or prevents the association of a polypeptide comprising the Fc domain subunit with an identical polypeptide to form a homodimer. Antibodies comprising an Fc region may or may not comprise a modification promoting the association of the first and the second subunit of the Fc domain. A modification promoting association as used herein particularly includes separate modifications made to each of the two Fc domain subunits desired to associate (i.e. the first and the second subunit of the Fc domain), wherein the modifications are complementary to each other so as to promote association of the two Fc domain subunits. For example, a modification promoting association may alter the structure or charge of one or both of the Fc domain subunits so as to make their association sterically or electrostatically favorable. Thus, (hetero)dimerization occurs between a polypeptide comprising the first Fc domain subunit and a polypeptide comprising the second Fc domain subunit, which might be non-identical, e.g. in the sense that further components fused to each of the subunits (e.g. antigen binding moieties) are not the same. In some embodiments the modification promoting association comprises an amino acid mutation in the Fc domain, specifically an amino acid substitution. In a particular embodiment, the modification promoting association comprises a separate amino acid mutation, specifically an amino acid substitution, in each of the two subunits of the Fc domain.

[0210] A “fragment” of an antibody as used herein is required to substantially retain the desired affinity of the full-length antibody. As such, suitable fragments of an anti-human CCR8 antibody will retain the ability to bind to the target chemokine receptor, e.g. to bind to human CCR8 receptor. Fragments of an antibody comprise a portion of a full-length antibody, generally the antigen binding or variable region thereof. Examples of antibody fragments include, but are not limited to, Fab, Fab′, F(ab′)2, and Fv fragments, single-chain antibody molecules, diabodies and domain antibodies, see Holt, Lucy J., et al. “Domain antibodies: proteins for therapy.” Trends in biotechnology 21.11 (2003): 484-490.

[0211] A “Fab fragment” contains the constant domain of the light chain and the first constant domain (CH2) of the heavy chain.

[0212] “Fab′ fragments” differ from Fab fragments by the addition of a few residues at the carboxyl terminus of the heavy chain CH2 domain including one or more cysteines from the antibody hinge region.

[0213] “F(ab) fragments” are produced by cleavage of the disulfide bond at the hinge cysteines of the F(ab′)2 pepsin digestion product. Additional chemical couplings of antibody fragments are known to those of ordinary skill in the art. Fab and F(ab′)2 fragments lack the Fc fragment of intact antibody, clear more rapidly from the circulation of animals, and may have less non-specific tissue binding than an intact antibody, see, e.g., Wahl, Richard L., Charles W. Parker, and Gordon W. Philpott. “Improved radioimaging and tumor localization with monoclonal F (ab′) 2.” Journal of nuclear medicine: official publication, Society of Nuclear Medicine 24.4 (1983): 316-325.

[0214] An “Fv fragment” is the minimum fragment of an antibody that contains a complete target recognition and binding site. This region consists of a dimer of one heavy and one light chain variable domain in a tight, non-covalent association (VH-VL dimer). It is in this configuration that the three CDRs of each variable domain interact to define an antigen binding site on the surface of the VH-VL dimer. Often, the six CDRs confer antigen binding specificity upon the antibody. However, in some instances even a single variable domain (or half of an Fv comprising only three CDRs specific for a target) may have the ability to recognize and bind the antigen, although at a lower affinity than the entire binding site.

[0215] “Single-chain Fv” or “scFv” antibody fragments comprise the VH and VL domains of an antibody in a single polypeptide chain. Generally, the Fv polypeptide further comprises a polypeptide linker between the VH and VL domains which enables the scFv to form the desired structure for antigen binding.

[0216] “Single domain antibodies” are composed of single VH or VL domains which exhibit sufficient affinity to the target. In a specific embodiment, the single domain antibody is a camelized antibody, see, e.g., Riechmann, Lutz, and Serge Muyldermans. “Single domain antibodies: comparison of camel VH and camelised human VH domains.” Journal of immunological methods 231.1-2 (1999): 25-38.

[0217] “Bispecific antibodies” are monoclonal antibodies that have binding specificities for at least two different epitopes on the same or different antigens. In the present disclosure, one of the binding specificities can be directed towards the target chemokine receptor such as CCR8, the other can be for any other antigen, e.g., without limitation for a cell-surface protein, receptor, receptor subunit, tissue-specific antigen, virally derived protein, virally encoded envelope protein, bacterially derived protein, or bacterial surface protein. Bispecific antibody constructs according to the invention also encompass multispecific antibody constructs comprising multiple binding domains/binding sites, such as trispecific antibody constructs, where the construct comprises three binding domains.

[0218] “Derivatized antibodies” are typically modified by glycosylation, acetylation, pegylation, phosphorylation, sulfation, amidation, derivatization by known protecting/blocking groups, proteolytic cleavage, linkage to a cellular ligand or other protein. Any of numerous chemical modifications may be carried out by known techniques, including, but not limited to, specific chemical cleavage, acetylation, formylation, metabolic synthesis of tunicamycin, etc. Additionally, the derivative may contain one or more non-natural amino acids, e.g., using ambrx technology, see, e.g., Wolfson, Wendy. “Amber codon flashing ambrx augments proteins with unnatural amino acids.” Chemistry & biology 13.10 (2006): 1011-1012. Antibodies according to the current invention may be derivatized, e.g. glycosylated or sulfated.

[0219] “Monoclonal antibodies” are substantially homogenous populations of antibodies binding a particular antigen. Monoclonal immunoglobulins may be obtained by methods well known to those skilled in the art (see for example, Kohler, Georges, and Cesar Milstein. “Continuous cultures of fused cells secreting antibody of predefined specificity.” nature 256.5517 (1975): 495-497, and U.S. Pat. No. 4,376,110). An immunoglobulin or immunoglobulin fragment with specific binding affinity can be isolated, enriched, or purified from a prokaryotic or eukaryotic organism. Routine methods known to those skilled in the art enable production of both immunoglobulins or immunoglobulin fragments and proteinaceous binding molecules with immunoglobulin-like functions, in both prokaryotic and eukaryotic organisms. The antibodies according to the current invention are preferably monoclonal.

[0220] “Humanized antibodies” contain CDR regions derived from a non-human species, such as mouse, that have, for example, been engrafted, along with any necessary framework back-mutations, into human sequence-derived V regions. Thus, for the most part, humanized antibodies are human immunoglobulins (recipient antibody) in which residues from a hypervariable region of the recipient are replaced by residues from a hypervariable region of a non-human species (donor antibody) such as mouse, rat, rabbit or non-human primate having the desired specificity, affinity, and capacity. See, for example, U.S. Pat. Nos. 5,225,539; 5,585,089; 5,693,761; 5,693,762; 5,859,205, each herein incorporated by reference. In some instances, framework residues of the human immunoglobulin are replaced by corresponding non-human residues. Furthermore, humanized antibodies may comprise residues that are not found in the recipient antibody or in the donor antibody. These modifications are made to further refine antibody performance (e.g., to obtain desired affinity). In general, the humanized antibody will comprise substantially all of at least one, and typically two, variable domains, in which all or substantially all of the hypervariable regions correspond to those of a non-human immunoglobulin and all or substantially all of the framework regions are those of a human immunoglobulin sequence. The humanized antibody optionally comprises at least a portion of an immunoglobulin constant region (Fc), typically that of a human immunoglobulin. For further details see Jones, Peter T., et al. “Replacing the complementarity-determining regions in a human antibody with those from a mouse.” Nature 321.6069 (1986): 522-525; Riechmann, Lutz, et al. “Reshaping human antibodies for therapy.” Nature 332.6162 (1988): 323-327; and Presta, Leonard G. “Antibody engineering.” Current Opinion in Structural Biology 2.4 (1992): 593-596, each incorporated herein by reference.

[0221] Fully human antibodies (human antibodies) comprise human derived CDRs, i.e. CDRs of human origin. Preferably, a fully human antibody according to the current invention is an antibody having at least 90%, 91%, 92%, 93%, 94%, 95%, 96%, 97%, 98%, 99%, 99.5% or 100% sequence identity with the closest human VH germline gene (e.g. sequence extracted from recommended list and analyzed in IMGT/Domain-gap-align).

[0222] As accepted by usual nomenclature systems such as the INN species subsystem in force until 2017, fully human antibodies may comprise a low number of germline deviations compared with the closest human germline reference determined based on the IMGT database (http://www.imgt.org, Nov. 29, 2019). For example, a fully human antibody according to the current invention may comprise up to 1, 2, 3, 4, 5, 6, 7, 8, 9, 10, 12, 13, 14 or 15 germline deviations in the CDRs compared with the closest human germline reference. Fully human antibodies can be developed from human derived B cells by cloning techniques in combination with a cell enrichment or immortalization step. The majority of fully human antibodies in clinical use, however, were isolated either from immunized mice transgenic for the human IgG locus or from sophisticated combinatorial libraries by phage display (Bruggemann, Marianne, et al. “Human antibody production in transgenic animals.” Archivum immunologiae et therapiae experimentalis 63.2 (2015): 101-108; Carter, Paul J. “Potent antibody therapeutics by design.” Nature reviews immunology 6.5 (2006): 343-357; Frenzel, André, Thomas Schirrmann, and Michael Hust. “Phage display-derived human antibodies in clinical development and therapy.” MAbs. Vol. 8. No. 7. Taylor & Francis, 2016; Nelson, Aaron L., Eugen Dhimolea, and Janice M. Reichert. “Development trends for human monoclonal antibody therapeutics.” Nature reviews drug discovery 9.10 (2010): 767-774).

[0223] Several techniques are available to generate fully human antibodies or to generate antibodies comprising human derived CDRs (cf. WO2008112640). Cambridge Antibody Technologies (CAT) and Dyax have obtained antibody cDNA sequences from peripheral B cells isolated from immunized humans and devised phage display libraries for the identification of human variable region sequences of a particular specificity. Briefly, the antibody variable region sequences are fused either with the Gene III or Gene VIII structure of the M13 bacteriophage. These antibody variable region sequences are expressed either as Fab or single chain Fv (scFv) structures at the tip of the phage carrying the respective sequences. Through rounds of a panning process using different levels of antigen binding conditions (stringencies), phages expressing Fab or scFv structures that are specific for the antigen of interest can be selected and isolated. The antibody variable region cDNA sequences of selected phages can then be elucidated using standard sequencing procedures. These sequences may then be used for the reconstruction of a full antibody having the desired isotype using established antibody engineering techniques. Antibodies constructed in accordance with this method are considered fully human antibodies (including the CDRs). In order to improve the immunoreactivity (antigen binding affinity and specificity) of the selected antibody, an in vitro maturation process can be introduced, including a combinatorial association of different heavy and light chains, deletion/addition/mutation at the CDR3 of the heavy and light chains (to mimic V-J, and V-D-J recombination), and random mutations (to mimic somatic hypermutation). An example of a “fully human” antibody generated by this method is the anti-tumor necrosis factor α antibody, Humira (adalimumab).

[0224] The term “polynucleotide” refers to a recombinantly or synthetically produced polymeric desoxyribonucleotide or analog thereof, or a modified polynucleotide. The term comprises double and single stranded DNA or RNA. The polynucleotide can be integrated e.g. into minicircles, plasmids, cosmids, minichromosomes, or artificial chromosomes. The polynucleotide can be isolated or integrated in another nucleic acid molecule, e.g. in an expression vector or chromosome of a eukaryotic host cell.

[0225] The term “vector”, as used herein, refers to a nucleic acid molecule capable of propagating a nucleic acid molecule to which it is linked. The term further comprises plasmids (non-viral) and viral vectors. Certain vectors are capable of directing the expression of nucleic acids or polynucleotides to which they are operatively linked. Such vectors are referred to herein as “expression vectors”. Expression vectors for eukaryotic use can be constructed by inserting a polynucleotide sequence encoding at least one protein of interest (POI) into a suitable vector backbone. The vector backbone can comprise the necessary elements to ensure maintenance of the vector and, if desirable, to provide amplification within the host. For viral vectors, e.g. lentiviral or retroviral vectors, further virus specific elements such as structural elements or other elements can be required and are well known in the art. These elements can be for instance provided in cis (on the same plasmid) or in trans (on a separate plasmid). Viral vectors may require helper viruses or packaging lines for large-scale transfection. Vectors may contain further elements such as e.g. enhancer elements (e.g. viral, eukaryotic), introns, and viral origins of plasmid replication for replication in mammalian cells. According to the current invention, expression vectors typically have a promoter sequence that drives expression of the POI. Expression of the POI and/or selective marker protein may be constitutive or regulated (e.g. inducible by addition or removal of small molecule inductors). Preferred regulatory sequences for mammalian host cell expression include viral elements that direct high levels of expression of a POI in mammalian cells, such as regulatory elements, promoters and/or enhancers derived from cytomegalovirus (CMV), Simian Virus 40 (SV40), adenovirus, (e.g., the adenovirus major late promoter Ad LP) or polyoma. For further description of viral regulatory elements, and sequences thereof, see e.g., U.S. Pat. Nos. 5,168,062, 4,510,245 and 4,968,615.

[0226] The term “linker” or “spacer” as used herein refers to any molecule enabling a direct topological connection between two moieties. A moiety may be inter alia a polypeptide, a protein, an antibody, an antibody fragment, a cytotoxic moiety, a binding moiety, a moiety for detection such as a fluorophore, a moiety for immobilization or retrieval such as beads or magnetic beads, a reactive moiety, or any other molecule. The two moieties may be of the same type or different. Linkers may be part of conjugates and may even contribute to their function. For instance, for a conjugate comprising a polypeptide and a biotin, the presence of a spacer of approximately 4 Å (˜5 atoms) between the carboxy group of the biotin and the 1st bulky amino acid of the peptide allows the biotin to reach the (strept)avidin binding pocket. Various linkers are known in the art and can be selected based on the moieties which shall be connected. The linker length typically ranges between 4 atoms and more than 200 atoms. Linkers exceeding 60 atoms in length generally comprise a population of compounds having an average length.

[0227] “Linkers for polypeptides” may be attached through an amide linkage or any other functional residue. Linkers for polypeptides may be attached N-terminal or C-terminal of the polypeptide or may be attached via a reactive functional group or amino acid side chain. Polypeptides may be coupled for example to biotin, proteins such as human serum albumin (HSA), carrier proteins such as keyhole limpet hemocyanin (KLH), ovalbumin (OVA) or bovine serum albumin (BSA), fluorescent dyes, short amino acid sequences such as Flag tag, HA tag, Myc tag or His tag, reactive tags such as maleimides, iodoacetamides, alkyl halides, 3-mercaptopropyl or 4-azidobutyric acid, or to various further suitable moieties. Non-limiting examples for suitable linkers, e.g. for conjugation of polypeptides, include beta-alanine, 4-aminobutyric acid (GABA), (2-aminoethoxy) acetic acid (AEA), 5-aminovaleric acid (Ava), 6-aminohexanoic acid (Ahx), PEG2 spacer (8-amino-3,6-dioxaoctanoic acid), PEG3 spacer (12-amino-4,7,10-trioxadodecanoic acid), PEG4 spacer (15-amino-4,7,10,13-tetraoxapenta-decanoic acid), and Ttds (Trioxatridecan-succinamic acid). In some cases, the linker may be derived from a reactive moiety, e.g. maleimides, iodoacetamides, alkyl halides, 3-mercaptopropyl or 4-azidobutyric acid. In some cases, the linker may comprise polyethylene glycol (PEG), polypropylene glycol, polyoxyalkylenes, or copolymers of polyethylene glycol or polypropylene glycol.

[0228] “Linkers for antibodies” are linkers establishing a covalent connection between different antibody portions and include peptide linker and non-proteinaceous polymers, including but not limited to polyethylene glycol (PEG), polypropylene glycol, polyoxyalkylenes, or copolymers of polyethylene glycol, polypropylene glycol.

[0229] “Treating” a disease in a subject or “treating” a subject having a disease refers to subjecting the subject to a pharmaceutical treatment, e.g., the administration of a drug, such that at least one symptom of the disease is decreased or prevented from worsening.

[0230] The terms “prevent”, “preventing”, “prevention” and the like refer to reducing the probability of developing a disease, disorder, or condition in a subject, who does not have, but is at risk of or susceptible to developing a disease, disorder, or condition.

[0231] The term “effective amount” or “therapeutically effective amount” are used interchangeably herein and refer to an amount sufficient to achieve a particular biological result or to modulate or ameliorate a symptom in a subject, or the time of onset of a symptom, typically by at least about 10%; usually by at least about 20%, preferably at least about 30%, or more preferably at least about 50%. Efficacy of the use of an antibody in cancer therapy can be assessed based on the change in tumor burden. Both tumor shrinkage (objective response) and time to the development of disease progression are important endpoints in cancer clinical trials. Standardized response criteria, known as RECIST (Response Evaluation Criteria in Solid Tumors), were published in 2000. An update (RECIST 1.1) was released in 2009. RECIST criteria are typically used in clinical trials where objective response is the primary study endpoint, as well as in trials where assessment of stable disease, tumor progression or time to progression analyses are undertaken because these outcome measures are based on an assessment of anatomical tumor burden and its change over the course of the trial. An effective amount for a particular subject may vary depending on factors such as the condition being treated, the overall health of the subject, the method, route, and dose of administration and the severity of side effects. When in combination, an effective amount is in ratio to a combination of components and the effect is not limited to individual components alone.

[0232] If not defined otherwise, “Complete Response” (CR) is defined as disappearance of all target lesions. Any pathological lymph nodes (whether target or non-target) must have reduction in short axis to <10 mm. For “Partial Response” (PR) at least a 30% decrease in the sum of diameters of target lesions has to be reached, taking as reference the baseline sum diameters. For “Progressive Disease” (PD) at least a 20% increase in the sum of diameters of target lesions, taking as reference the smallest sum on study (this includes the baseline sum if that is the smallest on study). In addition to the relative increase of 20%, the sum must also demonstrate an absolute increase of at least 5 mm. In “Stable Disease” (SD) neither sufficient shrinkage to qualify for PR nor sufficient increase to qualify for PD is observed, taking as reference the smallest sum diameters while on study.

[0233] Secondary outcome measures that can be used to determine the therapeutic benefit of the inventive antibodies described herein include the following: “Objective Response Rate” (ORR) is defined as the proportion of subjects who achieve a complete response (CR) or partial response (PR). “Progression Free Survival” (PFS) is defined as the time from the first dose date of an antibody to either disease progression or death, whichever occurs first. “Overall Survival” (OS) is defined as the length of time from either the date of diagnosis or the start of treatment for a disease, that patients diagnosed with the disease are still alive. “Duration of Overall Response” (DOR) is defined as the time from the participant's initial CR or PR to the time of disease progression. “Depth of Response” (DpR) is defined as the percentage of tumor shrinkage observed at the maximal response point compared to baseline tumor load. Clinical endpoints for both ORR and PFS can be determined based on RECIST 1.1 criteria described above.

[0234] Where non-human subjects are analyzed, the aforementioned parameters to determine therapeutic efficacy and benefit have to be adapted as discussed elsewhere herein, cf. example 12 ff.

[0235] Typical “subjects” according to the current invention include human and non-human subjects. Subjects can be mammals such as mice, rats, cats, dogs, primates and/or humans.

[0236] “Pharmaceutical compositions” (also “therapeutic formulations”) of the antibody, fragment or conjugate can be prepared by mixing the antibody having the desired degree of purity with optional physiologically acceptable carriers, excipients or stabilizers, e.g. according to Remington's Pharmaceutical Sciences (18^{th} ed.; Mack Pub. Co.: Eaton, Pa., 1990), e.g. in the form of lyophilized formulations or aqueous solutions. Acceptable carriers, excipients, or stabilizers are nontoxic to recipients at the dosages and concentrations employed, and include buffers such as phosphate, citrate, and other organic acids; antioxidants including ascorbic acid and methionine; preservatives (such as octadecyldimethylbenzyl ammonium chloride; hexamethonium chloride; benzalkonium chloride, benzethonium chloride; phenol, butyl or benzyl alcohol; alkyl parabens such as methyl or propyl paraben; catechol; resorcinol; cyclohexanol; 3-pentanol; and m-cresol); low molecular weight (less than about 10 residues) polypeptide; proteins, such as serum albumin, gelatin, or immunoglobulins; hydrophilic polymers such as polyvinylpyrrolidone; amino acids such as glycine, glutamine, asparagine, histidine, arginine, or lysine; monosaccharides, disaccharides, and other carbohydrates including glucose, mannose, or dextrins; chelating agents such as EDTA; sugars such as sucrose, mannitol, trehalose or sorbitol; salt-forming counter-ions such as sodium; metal complexes (e.g., Zn-protein complexes); and/or non-ionic surfactants such as Tween®, Pluronic® or polyethylene glycol (PEG).

[0237] A “host cell” is a cell that is used to receive, maintain, reproduce and amplify a vector. A host cell also can be used to express the polypeptide, e.g. an antibody or fragment thereof encoded by the vector. The nucleic acid contained in the vector is replicated when the host cell divides, thereby amplifying the nucleic acids. Preferred host cells are mammalian cells, such as CHO cells or HEK cells. Further preferred host cells are rat myeloma YB2/0 cell.

[0238] A “cell with endogenous target expression” is a cell which expresses a target protein at a level which is comparable to the physiological or diseased situation. Typically, cells which have been engineered for overexpression express a target protein at much higher levels.

[0239] The term “intra-tumoral”, “intratumoral”, “tumor infiltrating” or “tumoral” in the context of cells, structures, proteins, antibodies, or markers refers to their localization within the tumor tissue.

[0240] Cells which are “positive” or “+” for a certain marker or protein are cells characterized by substantial expression of that marker or protein. Marker or protein expression can be determined and quantified as known in the art, e.g. to define different cell populations. For the characterization of (immune) cell populations, the marker expression can be determined by FACS or using any other technique described herein.

[0241] “Leukocytes” are immune cells expressing CD45. “CD45+ cells”, as used herein, refer to all leukocytes. CD45 can be used as a marker to distinguish immune cells and non-immune cells.

[0242] The term “lymphocyte” refers to all immature, mature, undifferentiated, and differentiated white lymphocyte populations, including tissue specific and specialized varieties. It encompasses, by way of non-limiting example, B cells, T cells, NKT cells, and NK cells. In some embodiments, lymphocytes include all B cell lineages including pre-B cells, progenitor B cells, early pro-B cells, late pro-B cells, large pre-B cells, small pre-B cells, immature B cells, mature B cells, plasma B cells, memory B cells, B-1 cells, B-2 cells, and anergic AN1/T3 cell populations.

[0243] “T cells” are immune cells expressing TCRαβ, CD3, and CD8 or CD4. As used herein, the term includes naive T cells, CD4+ T cells, CD8+ T cells, regulatory T cells, memory T cells, activated T cells, anergic T cells, tolerant T cells, chimeric B cells, and antigen-specific T cells and further T cell populations known in the art. In some embodiments, the presence of a T cell receptor (TCR) on the cell surface distinguishes T cells from other lymphocytes.

[0244] “CD8+ T cells” (also “cytotoxic T cell”, “TC”, “cytotoxic T lymphocyte”, “CTL”, “T-killer cell”, “cytolytic T cell”, “CD8+ T-cell” or “killer T cell”) are T cells expressing CD3, CD45 and CD8. CD8+ T cells can kill cancer cells, cells that are infected (particularly with viruses), or otherwise damaged cells. “CD4+ T cells” (also “T helper cells”, “Th cells”) are immune cells expressing CD3, CD4 and CD45. There are several subsets of T helper cells, such as, without limitation, Th1, Th2, and Th17. CD4+ T cells help suppress or regulate immune responses. They are essential in B cell antibody class switching, in the activation and growth of cytotoxic T cells, and in maximizing bactericidal activity of phagocytes such as macrophages.

[0245] As used herein, the term “Treg cells” (also “Tregs”, “regulatory T cells”, “T regulatory cells”, “suppressor T cells”) refers to immune cells expressing CD3, CD4, CD45, and FoxP3, and furthermore expressing high levels of CD25 and low levels of CD127. Identification of Treg cells may be performed as described elsewhere herein. Treg cells typically also express high levels of CTLA-4, GITR, and LAG-3. In the literature, Tregs have furthermore been classified based on memory marker CD45RO.

[0246] Under physiological conditions, Treg cells maintain immunological tolerance. During an immune response, Treg cells stop T cell-mediated immunity and suppress auto-reactive T cells that have escaped negative selection within the thymus. Treg cells can also suppress other types of immune cells such as NK cells and B cells. Adaptive Treg cells (called Th3 or Tr1 cells) are thought to be generated during an immune response.

[0247] Treg cells furthermore play an important role in immune escape by suppressing antitumor immunity, thereby providing an environment of immune tolerance. T cells that recognize cancer cells are often present in large numbers in tumors, but their cytotoxic function is suppressed by nearby immune-suppressor cells. Tregs are abundant in many different cancers, are highly enriched in the tumor microenvironment, and are well known for their role in tumor progression.

[0248] “Activated Treg cells” express CD4, CD45, FoxP3, CD69 and CCR8, and furthermore have a high expression of CD25, and have a low expression of CD127. CD69 is a T cell activation marker.

[0249] “CCR8 positive regulatory T cells” or “CCR8+ regulatory T cells” are Tregs expressing CCR8.

“CD4conv cells” are conventional CD4+, CD25− T cells.

[0250] “Gamma delta T cells” are T cells that express a distinctive T-cell receptor, TCRγδ, on their surface. Gamma delta T cells also express CD3.

[0251] “B cells” are immune cells expressing CD19, and mature B cells express CD20 and CD22. B cells upon activation via CD40 undergo differentiation where somatic hypermutation and enhanced immunoglobulin class switch occur resulting in mature B cells or plasma cells (capable of secreting Abs). B cells are involved in humoral immunity of the adaptive immune system, and are antigen presenting cells.

[0252] “Macrophages” are immune cells expressing low CD14, high CD16, CD11b, CD68, CD163, and CD206. Macrophages engulf and digest cellular debris, foreign substances, microbes or cancer cells by phagocytosis. Besides phagocytosis, macrophages play a critical role in innate immunity and also help initiate adaptive immunity by recruiting other immune cells. For example, macrophages are important as antigen presenters to T cells. Macrophages that encourage inflammation are called M1 macrophages, whereas those that decrease inflammation and encourage tissue repair are called M2 macrophages.

[0253] As used herein, “M1 macrophages” are a subset of macrophages expressing ACOD1. M1 macrophages have pro-inflammatory, bactericidal, and phagocytic functions.

[0254] As used herein, “M2 macrophages” are a subset of macrophages expressing MRC1 (CD206). M2 macrophages secrete anti-inflammatory interleukins, play a role in wound healing and are needed for revascularization and reepithelialization. Tumor-associated macrophages are mainly of the M2 phenotype and seem to actively promote tumor growth.

[0255] “Dendritic Cells” (DCs) are bone marrow derived leukocytes and are the most potent type of antigen-presenting cells. DCs are specialized to capture and process antigens, converting proteins to peptides that are presented on major histocompatibility complex (MHC) molecules recognized by T cells. As defined herein, DCs are characterized by expression of CD1c, CD14, CD16, CD141, CD11c and CD123. Different subpopulations of Dendritic cells exist. In human, DC1 are immunogenic while DC2 cells are tolerogenic. Mature DC express CD83, while plasmacytoid DC express CD123.

[0256] “NK cells” (also natural killer cells) are immune cells which express CD45, CD16, CD56, NKG2D, but are CD3 negative. NK cells do not require activation to kill cells that are missing “self” markers of MHC class 1. NCR1 (also referred to as CD335 or NKp46) is expressed on NK cells and on a subset of NKT cells.

[0257] “Natural killer T (NKT) cells” are a heterogeneous group of T cells that share properties of both T cells and natural killer cells.

[0258] “iNKT cells” (also “invariant natural killer T cells”) express invariant αβ TCR (Vα24-Jα18, CD24lo), CD44hi, NK1.1 (mouse), and NKG2D. The invariant TCR recognizes glycoplipid antigen presented by non-polymorphic MHC class I-like molecule, CD1d. These cells can influence an immune response by rapidly producing large amounts of cytokines, i.e. IFNg.

[0259] As known in the art, “effector cells” are immune cells that actively support immune response after stimulation. As used herein, effector cells refer to immune cells expressing Fcγ receptors and are therefore able to mediate ADCC or ADCP. Non-limiting examples of effector cells are monocytes, neutrophils, mast cells, and, preferably, macrophages, and natural killer cells.

[0260] “Tertiary lymphoid structures” are intra-tumoral structures characterized by increased expression of LTta, LTtb, Cxcr5 and Cxcl13.

[0261] The term “chimeric antigen receptor” or “CAR” as used herein, refers to an artificial T cell surface receptor that is engineered to be expressed on an immune effector cell and specifically bind an antigen. CARs may be used as a therapy with adoptive cell transfer. Monocytes are removed from a patient (blood, tumor or ascites fluid) and modified so that they express the receptors specific to a particular form of antigen. In some embodiments, the CARs have been expressed with specificity to a tumor associated antigen. CARs may also comprise an intracellular activation domain, a transmembrane domain and an extracellular domain comprising a tumor associated antigen binding region. In some aspects, CARs comprise fusions of single-chain variable fragments (scFv) derived monoclonal antibodies, fused to CD3-zeta transmembrane and intracellular domain. The specificity of CAR designs may be derived from ligands of receptors (e.g., peptides). In some embodiments, a CAR can target cancers by redirecting a monocyte/macrophage expressing the CAR specific for tumor associated antigens.

[0262] Dosing schemes are abbreviated as known in the art, e.g. every day (QD), every 2 days (Q2D), or every 3 days (Q3D).

### EMBODIMENTS

### Antigens and Antibodies Binding Chemokine Receptors

### Aspect 1—Antigen

[0263] According to a first aspect there is provided an isolated sulfated polypeptide comprising the tyrosine rich domain (TRD) of a seven transmembrane receptor. A tyrosine rich domain is a conserved, N terminal domain, which characterizes seven transmembrane receptors such as CXC and CC chemokine receptors, cf. example 1. As used herein, the term TRD refers to the amino acid or protein sequence of a CXC or CC chemokine receptor which is located N terminal of the first cysteine counted from the N terminus. Besides tyrosine, a TRD typically comprises negatively charged amino acid residues such as aspartic acid. The TRDs for all CC and CXC chemokine receptors are listed in example 4, Table 4.1 for mouse, monkey and human.

[0264] Tyrosine sulfation is a ubiquitous posttranslational protein modification which occurs in all multicellular organisms. It is catalyzed by tyrosylprotein sulfotransferases (TPSTs) 1 and 2, Golgi-resident enzymes which transfer sulfate from the cofactor PAPS (3′-phosphoadenosine 5′-phosphosulfate) to a context-dependent tyrosine in a protein substrate. Currently, only a small fraction of sulfated proteins is known and the understanding of the biological sulfation mechanisms and specific modification positions is still in progress, cf. example 4. While post-translational modifications, such as glycosylation, phosphorylation, acylation, adenylation, farnesylation, ubiquitination, and sulfation are frequent in proteins of living systems, antibody generation is typically performed based on the unmodified target sequence.

[0265] The inventors developed an unusual approach for antibody generation, and surprisingly found that the synthetically sulfated polypeptides according to the first aspect could be used to increase both, the success rates for antibody generation for chemokine receptors per se, and also the success rates for chemokine receptor antibodies with superior functional properties for therapeutic uses, as discussed elsewhere herein. The increased success rate for highly specific chemokine receptor antibodies was particularly surprising, because research antibodies which are designed for the sequence independent detection of sulfated tyrosine as a post-translational modification are rare.

[0266] The seven transmembrane receptor may be from any species expressing chemokine receptors characterized by a TRD, e.g. human, monkey, Macaca fascicularis (cynomolgus monkey), Macaca mulatta (rhesus macaque), rodent, mouse, rat, horse, bovine, pig, dog, cat and camel.

[0267] According to some first embodiments of the first aspect, there is provided an isolated polypeptide, wherein the isolated polypeptide comprises the tyrosine rich domain (TRD) of a seven transmembrane receptor, further characterized in that at least 25%, at least 50%, or at least 75% of the tyrosine residues of the TRD are sulfated.

[0268] For example, in a highly successful antibody campaign, the TRD of human or cynomolgus CCR8 was sulfated at positions Y3, Y15 and Y17, while Y16 was omitted, i.e. 75% of tyrosines in the TRD were sulfated (Table 6.1). In another example, the TRD of human CCR4 was sulfated at positions 19 and 22 and was used for off-target binding, i.e. 50% of the tyrosines were sulfated (Table 8.1). In yet another approach, the TRD of murine CCR4 was sulfated at position 22 and used for off target binding, i.e. 25% of tyrosines in the TRD were sulfated (Table 6.1).

[0269] Table 4.1 shows a list of sulfated peptides including the preferred positions for tyrosine sulfations. Without being bound by theory, the inventors believe that the introduction of additional charges in the form of tyrosine sulfations tailors the antibody to recognize a specific pattern of negative charges. This recognition seems to require an increased percentage of tyrosines and positively charged amino acids, at least in the HCDR3 of the antibody, i.e., the use of the isolated sulfated polypeptides according to the current invention also influenced the structural composition of the antibodies and in particular the amino acid composition of the HCDR3, cf. example 9.

[0270] According to some second embodiments of the first aspect, which may be or may not be the same as the first embodiments according to the first aspect, there is provided an isolated polypeptide, wherein the seven transmembrane receptor is human, cynomolgus or mouse.

[0271] In some of these second embodiments the seven transmembrane receptor is murine. In some preferred of these second embodiments the seven transmembrane receptor is human and/or cynomolgus. In some preferred of these second embodiments the seven transmembrane receptor is human. In some of these second embodiments the seven transmembrane receptor is cynomolgus.

[0272] According to some third embodiments of the first aspect, which may be or may not be the same as the first and/or second embodiments according to the first aspect, there is provided an isolated polypeptide, wherein the seven transmembrane receptor is a chemokine receptor, preferably
[0273] a) a CC chemokine receptor such as CCR1, CCR2, CCR3, CCR4, CCR5, CCR6, CCR7, CCR8, CCR9 or CCR10,
[0274] b) a CXC chemokine receptor such as CXCR1, CXCR2, CXCR3, CXCR4, CXCR5, or CXCR6, or
[0275] c) CX3CR1 or CXCR1.

[0276] In some of these third embodiments, the seven transmembrane receptor is a CC chemokine receptor or a CXC chemokine receptor. In some of these third embodiments, the seven transmembrane receptor is a CC chemokine receptor, such as CCR1, CCR2, CCR3, CCR4, CCR5, CCR6, CCR7, CCR8, CCR9 or CCR10. In some preferred of these third embodiments, the seven transmembrane receptor is CCR8 or CCR4. In some highly preferred of these third embodiments, the seven transmembrane receptor is CCR8. In some of these third embodiments, the seven transmembrane receptor is a CXC chemokine receptor, such as CXCR1, CXCR2, CXCR3, CXCR4, CXCR5, or CXCR6. In some of these third embodiments, the seven transmembrane receptor is CX3CR1 or CXCR1.

[0277] In some preferred embodiments of the first aspect, there is provided an isolated polypeptide which comprises the TRD of a human or cynomolgus seven transmembrane receptor, further characterized in that at least 25%, at least 50%, or at least 75% of the tyrosine residues of the TRD are sulfated, wherein the seven transmembrane receptor is a CC chemokine receptor or a CXC chemokine receptor, and preferably, wherein the seven transmembrane receptor is CCR8 or CCR4.

[0278] According to some embodiments A of the third embodiments of the first aspect, the isolated sulfated polypeptide comprises a sequence according to or having at least 90%, 95% or 98% sequence identity with
[0279] a) SEQ ID NO:1 (CCR1_HUMAN_TRD), preferably wherein at least Y10 and/or Y18 have been sulfated, or
[0280] b) SEQ ID NO:7 (CCR2_HUMAN_TRD), preferably wherein at least Y26 has been sulfated, or
[0281] c) SEQ ID NO:13 (CCR3_HUMAN_TRD), preferably wherein Y16 and/or Y17 have been sulfated, or
[0282] d) SEQ ID NO:19 (CCR4_HUMAN_TRD), preferably wherein at least Y22 has been sulfated and preferably furthermore Y16, Y19 and/or Y20 have been sulfated, or
[0283] e) SEQ ID NO:25 (CCR5_HUMAN_TRD), preferably wherein two, three or all of Y3, Y10, Y14 and Y15 have been sulfated, or
[0284] f) SEQ ID NO:31 (CCR6_HUMAN_TRD), preferably wherein at least two or three of Y18, Y26 and Y27 have been sulfated, or
[0285] g) SEQ ID NO:37 (CCR7_HUMAN_TRD), preferably wherein one or both of Y8 and Y17 have been sulfated, or
[0286] h) SEQ ID NO:43 (CCR8_HUMAN_TRD), preferably wherein at least two or all of Y3, Y15 and Y17 have been sulfated, or
[0287] i) SEQ ID NO:61 (CCR9_HUMAN_TRD), wherein at least Y28 and preferably also Y17 and/or Y37 have been sulfated, or
[0288] j) SEQ ID NO:67 (CCR10_HUMAN_TRD), preferably wherein at least one or both of Y14 and Y22 have been sulfated, or
[0289] k) SEQ ID NO:73 (CXCR1_HUMAN_TRD), preferably wherein Y27 has been sulfated, or
[0290] l) SEQ ID NO:79 (CXCR2_HUMAN_TRD), preferably wherein Y23 and/or Y25 have been sulfated, or
[0291] m) SEQ ID NO:85 (CXCR3_HUMAN_TRD), preferably wherein at least one or both of Y27 and Y29 have been sulfated, or
[0292] n) SEQ ID NO:91 (CXCR4_HUMAN_TRD), preferably wherein at least Y12 and/or Y21 have been sulfated, or
[0293] o) SEQ ID NO:97 (CXCR5_HUMAN_TRD), preferably wherein at least one of Y3 and Y27 have been sulfated, or
[0294] p) SEQ ID NO:103 (CXCR6_HUMAN_TRD), preferably wherein at least one or both of Y6 and Y10 has been sulfated, or
[0295] q) SEQ ID NO:157 (CX3CR1_HUMAN_TRD), preferably wherein at least Y14 has been sulfated, or
[0296] r) SEQ ID NO:163 (CXCR1_HUMAN_TRD), preferably wherein at least Y27 has been sulfated.
   According to some embodiments B of the third embodiments of the first aspect, the isolated sulfated polypeptide comprises a sequence according to or having at least 90%, 95% or 98% sequence identity with
[0297] a) SEQ ID NO:3 (CCR1_MOUSE_TRD), preferably wherein at least Y10 and/or Y18 have been sulfated, or
[0298] b) SEQ ID NO:9 (CCR2_MOUSE_TRD), preferably wherein at least Y37 and/or Y39 has been sulfated, or
[0299] c) SEQ ID NO:15 (CCR3_MOUSE_TRD), preferably wherein Y20 and/or Y22 has been sulfated, or
[0300] d) SEQ ID NO:21 (CCR4_MOUSE_TRD), preferably wherein at least Y22 has been sulfated and preferably furthermore Y16, Y19 and/or Y20 have been sulfated, or
[0301] e) SEQ ID NO:27 (CCR5_MOUSE_TRD), preferably wherein two or three of Y10, Y12 and Y16 have been sulfated, or
[0302] f) SEQ ID NO:33 (CCR6_MOUSE_TRD), preferably wherein at least two or three of Y13, Y18 and Y19 have been sulfated,
[0303] g) SEQ ID NO:39 (CCR7_MOUSE_TRD), preferably wherein one or both of Y8 and Y17 and optionally Y20 have been sulfated have been sulfated, or
[0304] h) SEQ ID NO:45 (CCR8_MOUSE_TRD), preferably wherein at least two or all of Y3, Y14 and Y15 have been sulfated, or
[0305] i) SEQ ID NO:63 (CCR9_MOUSE_TRD), preferably wherein at least Y28 has been sulfated, and preferably also Y19 has been sulfated, or
[0306] j) SEQ ID NO:69 (CCR10_MOUSE_TRD), preferably wherein at least one, two or all of Y14, Y17 and Y22 has been sulfated, or
[0307] k) SEQ ID NO:75 (CXCR1_MOUSE_TRD), preferably wherein at least Y6 has been sulfated, or
[0308] l) SEQ ID NO:81 (CXCR2_MOUSE_TRD), preferably wherein Y24 has been sulfated, or
[0309] m) SEQ ID NO:87 (CXCR3_MOUSE_TRD), preferably wherein at least one or both of Y27 and Y29 have been sulfated, or
[0310] n) SEQ ID NO:93 (CXCR4_MOUSE_TRD), preferably wherein at least Y23, Y13 and/or Y14 have been sulfated, or
[0311] o) SEQ ID NO:99 (CXCR5_MOUSE_TRD), preferably wherein at least Y3 and/or Y14 and/or Y20 and/or Y26 have been sulfated, or
[0312] p) SEQ ID NO:105 (CXCR6_MOUSE_TRD), preferably wherein at least one or both of Y11 and Y15 have been sulfated, or
[0313] q) SEQ ID NO:159 (CX3CR1_MOUSE_TRD), preferably wherein at least Y15 has been sulfated, or
[0314] r) SEQ ID NO:165 (CXCR1_MOUSE_TRD), preferably wherein at least Y6 has been sulfated.

[0315] According to some embodiments C of the third embodiments of the first aspect, the isolated sulfated polypeptide comprises a sequence according to or having at least 90%, 95% or 98% sequence identity with
[0316] a) SEQ ID NO:2 (CCR1_MACFA_TRD), preferably wherein at least Y10 and/or Y18 have been sulfated, or
[0317] b) SEQ ID NO:8 (CCR2_MACMU_TRD), preferably wherein at least Y26 has been sulfated, or
[0318] c) SEQ ID NO:14 (CCR3_MACFA_TRD), preferably wherein Y16 has been sulfated, or
[0319] d) SEQ ID NO:20 (CCR4_MACFA_TRD), preferably wherein at least Y22 has been sulfated and preferably furthermore Y16, Y19 and/or Y20 have been sulfated, or
[0320] e) SEQ ID NO:26 (CCR5_MACMU_TRD), preferably wherein two, three or all of Y3, Y10, Y14 and Y15 have been sulfated, or
[0321] f) SEQ ID NO:32 (CCR6_MACFA_TRD), preferably wherein at least two or three of Y23, Y31 and Y32 have been sulfated, or
[0322] g) SEQ ID NO:38 (CCR7_MACFA_TRD), preferably wherein one or both of Y8 and Y17 have been sulfated, or
[0323] h) SEQ ID NO:44 (CCR8_MACFA_TRD), preferably wherein at least two or all of Y3, Y15 and Y17 have been sulfated, or
[0324] i) SEQ ID NO:62 (CCR9_MACFA_TRD), preferably wherein at least Y28, and preferably also Y17 and/or Y37 has been sulfated, or
[0325] j) SEQ ID NO:68 (CCR10_MACFA_TRD), preferably wherein at least one or both of Y14 and Y22 has been sulfated, or
[0326] k) SEQ ID NO:74 (CXCR1_MACFA_TRD), preferably wherein at least one of Y14 and Y28 has been sulfated, or
[0327] l) SEQ ID NO:80 (CXCR2_MACFA_TRD), preferably wherein Y20 and/or Y22 have been sulfated, or
[0328] m) SEQ ID NO:86 (CXCR3_MACFA_TRD), preferably wherein at least one or both of Y27 and Y29 have been sulfated, or
[0329] n) SEQ ID NO:92 (CXCR4_MACFA_TRD), preferably wherein at least Y12 and/or Y21 have been sulfated, or
[0330] o) SEQ ID NO:98 (CXCR5_MACFA_TRD), preferably wherein at least one of Y3 and Y27 have been sulfated, or
[0331] p) SEQ ID NO:104 (CXCR6_MACFA_TRD), preferably wherein at least two or all of Y4, Y7 and Y39 have been sulfated, or
[0332] q) SEQ ID NO:158 (CX3CR1_MACFA_TRD), preferably wherein at least Y20 has been sulfated, or
[0333] r) SEQ ID NO:164 (CXCR1_MACMU_TRD), preferably wherein at least Y14 has been sulfated.

[0334] In some fourth embodiments of the first aspect, which may be or may not be the same as the first, second and/or third embodiments according to the first aspect, the isolated polypeptide comprises the N terminus of the seven transmembrane receptor including TRD and LID domain, preferably wherein at least the cysteine between the TRD and the LID domain has been removed or has been altered into a different amino acid.

[0335] The extracellular domains of chemokine receptors can be structured into four regions:

(i) an N-terminal domain which can be subdivided into
[0336] (a) the membrane-distal tyrosine-rich domain (TRD),
[0337] (b) a cysteine, and
[0338] (c) a LID domain,
   (iii) an extracellular domain 1 (ECL1),
   (iii) an extracellular domain 2 (ECL2), and
   (iv) an extracellular domain 3 (ECL3).

[0339] Some of the polypeptides according to the current invention are difficult to handle, e.g. due to a high tendency for aggregation. Without being bound by theory, the inventors believe, that the high “stickiness” results from the increased numbers of charged amino acids and charged sulfate residues. For the polypeptides comprising the N terminus of a chemokine receptor, the aggregation properties could be ameliorated by removal or amino acid exchange of the cysteine between TRD and LID domain. Optimal results were obtained by altering the cysteine into a serine (example 5, Table 4.1).

[0340] In some of the fourth embodiments according to the first aspect, the cysteine may be omitted and TRD and LID are directly connected. In some different of the fourth embodiments according to the first aspect, the cysteine may be replaced by a different polar uncharged amino acid. In some preferred of the fourth embodiments according to the first aspect, the cysteine is replaced by a serine (cf. Table 4.1). In some of the fourth embodiments according to the first aspect, the cysteine may be replaced by at least one different amino acid.

[0341] According to some embodiments A of the fourth embodiments of the first aspect, the isolated sulfated polypeptide comprises a sequence according to or having at least 90%, 95% or 98% sequence identity with
[0342] a) SEQ ID NO:4 (CCR1_HUMAN_N term), wherein at least Y10 and/or Y18 have been sulfated,
[0343] b) SEQ ID NO:10 (CCR2_HUMAN_N term), wherein at least Y26 has been sulfated,
[0344] c) SEQ ID NO:16 (CCR3_HUMAN_N term), wherein Y16 and/or Y17 have been sulfated,
[0345] d) SEQ ID NO:22 (CCR4_HUMAN_N term), wherein at least Y22 has been sulfated and preferably furthermore Y16, Y19 and/or Y20 have been sulfated,
[0346] e) SEQ ID NO:28 (CCR5_HUMAN_N term), wherein two, three or all of Y3, Y10, Y14 and Y15 have been sulfated,
[0347] f) SEQ ID NO:34 (CCR6_HUMAN_N term), wherein at least two or three of Y18, Y26 and Y27 have been sulfated,
[0348] g) SEQ ID NO:40 (CCR7_HUMAN_N term), wherein one or both of Y8 and Y17 have been sulfated,
[0349] h) SEQ ID NO:46 (CCR8_HUMAN_N term), wherein at least two or all of Y3, Y15 and Y17 have been sulfated,
[0350] i) SEQ ID NO:64 (CCR9_ HUMAN_N term), wherein at least Y28, and preferably also Y17 and/or Y37 have been sulfated,
[0351] j) SEQ ID NO:70 (CCR10_HUMAN_N term), wherein at least one or both of Y14 and Y22 have been sulfated,
[0352] k) SEQ ID NO:76 (CXCR1_HUMAN_N term), wherein Y27 has been sulfated,
[0353] l) SEQ ID NO:82 (CXCR2_HUMAN_N term), wherein Y23 and/or Y25 have been sulfated,
[0354] m) SEQ ID NO:88 (CXCR3_HUMAN_N term), wherein at least one or both of Y27 and Y29 have been sulfated,
[0355] n) SEQ ID NO:94 (CXCR4_HUMAN_N term), wherein at least Y12 and/or Y21 have been sulfated,
[0356] o) SEQ ID NO:100 (CXCR5_HUMAN_N term), wherein at least one of Y3 and Y27 have been sulfated, or
[0357] p) SEQ ID NO:106 (CXCR6_HUMAN_N term), wherein at least one or both of Y6 and Y10 have been sulfated, or
[0358] q) SEQ ID NO:160 (CX3CR1_HUMAN_N term), preferably wherein at least Y14 has been sulfated, or
[0359] r) SEQ ID NO:166 (CXCR1_HUMAN_N term), preferably wherein at least Y27 has been sulfated.

[0360] According to some embodiments B of the fourth embodiments of the first aspect, the isolated sulfated polypeptide comprises a sequence according to or having at least 90%, 95% or 98% sequence identity with
[0361] a) SEQ ID NO:6 (CCR1_MOUSE_N term), preferably wherein at least Y10 and/or Y18 have been sulfated, or
[0362] b) SEQ ID NO:12 (CCR2_MOUSE_N term), preferably wherein at least Y37 and/or Y39 has been sulfated, or
[0363] c) SEQ ID NO:18 (CCR3_MOUSE_N term), preferably wherein Y20 and/or Y22 has been sulfated, or
[0364] d) SEQ ID NO:24 (CCR4_MOUSE_N term), preferably wherein at least Y22 has been sulfated and preferably furthermore Y16, Y19 and/or Y20 have been sulfated, or
[0365] e) SEQ ID NO:30 (CCR5_MOUSE_N term), preferably wherein two or three of Y10, Y12 and Y16 have been sulfated, or
[0366] f) SEQ ID NO:36 (CCR6_MOUSE_N term), preferably wherein at least two or three of Y13, Y18 and Y19 have been sulfated,
[0367] g) SEQ ID NO:42 (CCR7_MOUSE_N term), preferably wherein one or both of Y8 and Y17 and optionally Y20 have been sulfated, or
[0368] h) SEQ ID NO:48 (CCR8_MOUSE_N term with C=X or S), preferably wherein at least two or all of Y3, Y14 and Y15 have been sulfated, or
[0369] i) SEQ ID NO:66 (CCR9_MOUSE_N term), preferably wherein at least Y28 has been sulfated, and preferably also Y19 has been sulfated, or
[0370] j) SEQ ID NO:72 (CCR10_MOUSE_N term), preferably wherein at least one, two or all of Y14, Y17 and Y22 has been sulfated, or
[0371] k) SEQ ID NO:78 (CXCR1_MOUSE_N term), preferably wherein at least Y6 has been sulfated, or
[0372] l) SEQ ID NO:84 (CXCR2_MOUSE_N term), preferably wherein Y24 has been sulfated, or
[0373] m) SEQ ID NO:90 (CXCR3_MOUSE_N term), preferably wherein at least one or both of Y27 and Y29 have been sulfated, or
[0374] n) SEQ ID NO:96 (CXCR4_MOUSE_N term), preferably wherein at least Y23 and/or Y14 have been sulfated, or
[0375] o) SEQ ID NO:102 (CXCR5_MOUSE_N term), preferably wherein at least Y3 and/or Y14 and/or Y20 and/or Y26 have been sulfated, or
[0376] p) SEQ ID NO:108 (CXCR6_MOUSE_N term), preferably wherein at least one or both of Y11 and Y15 have been sulfated, or
[0377] q) SEQ ID NO:162 (CX3CR1_MOUSE_N term), preferably wherein at least Y15 has been sulfated, or
[0378] r) SEQ ID NO:168 (CXCR1_MOUSE_N term), preferably wherein at least Y6 has been sulfated.

[0379] According to some embodiments C of the fourth embodiments of the first aspect, the isolated sulfated polypeptide comprises a sequence according to or having at least 90%, 95% or 98% sequence identity with
[0380] a) SEQ ID NO:5 (CCR1_MACFA_N term), preferably wherein at least Y10 and/or Y18 have been sulfated, or
[0381] b) SEQ ID NO:11 (CCR2_MACMU_N term), preferably wherein at least Y26 has been sulfated, or
[0382] c) SEQ ID NO:17 (CCR3_MACFA_N term), preferably wherein Y16 has been sulfated, or
[0383] d) SEQ ID NO:23 (CCR4_MACFA_N term), preferably wherein at least Y22 has been sulfated and preferably furthermore Y16, Y19 and/or Y20 have been sulfated, or
[0384] e) SEQ ID NO:29 (CCR5_MACMU_N term), preferably wherein two, three or all of Y3, Y10, Y14 and Y15 have been sulfated, or
[0385] f) SEQ ID NO:35 (CCR6_MACFA_N term), preferably wherein at least two or three of Y23, Y31 and Y32 have been sulfated, or
[0386] g) SEQ ID NO:41 (CCR7_MACFA_N term), preferably wherein one or both of Y8 and Y17 have been sulfated, or
[0387] h) SEQ ID NO:47 (CCR8_MACFA_N term), preferably wherein at least two or all of Y3, Y15 and Y17 have been sulfated, or
[0388] i) SEQ ID NO:65 (CCR9_MACFA_N term), preferably wherein at least Y28, and preferably also Y17 and/or Y37 have been sulfated, or
[0389] j) SEQ ID NO: 71 (CCR10_MACFA_N term), preferably wherein at least one or both of Y14 and Y22 has been sulfated, or
[0390] k) SEQ ID NO:77 (CXCR1_MACFA_N term), preferably wherein at least one of Y14 and Y28 has been sulfated, or
[0391] l) SEQ ID NO:83 (CXCR2_MACFA_N term), preferably wherein Y20 and/or Y22 have been sulfated, or
[0392] m) SEQ ID NO:89 (CXCR3_MACFA_N term), preferably wherein at least one or both of Y27 and Y29 have been sulfated, or
[0393] n) SEQ ID NO:95 (CXCR4_MACFA_N term), preferably wherein at least Y12 and/or Y21 have been sulfated, or
[0394] o) SEQ ID NO:101 (CXCR5_MACFA_N term), preferably wherein at least one of Y3 and Y27 have been sulfated, or
[0395] p) SEQ ID NO:107 (CXCR6_MACFA_N term), preferably wherein at least two or all of Y4, Y7 and Y39 have been sulfated, or
[0396] q) SEQ ID NO:161 (CX3CR1_MACFA_N term), preferably wherein at least Y20 or Y22 has been sulfated, or
[0397] r) SEQ ID NO:167 (CXCR1_MACMU_N term), preferably wherein at least Y14 or Y28 has been sulfated.

[0398] In some of the fourth embodiments of the first aspect, the isolated sulfated polypeptide comprises a sequence according to
[0399] a) SEQ ID NO:4 (CCR1_HUMAN_N term), SEQ ID NO:5 (CCR1_MACFA_N term), or SEQ ID NO:6 (CCR1_MOUSE_N term), preferably wherein at least Y10 and/or Y18 have been sulfated, or
[0400] b) SEQ ID NO:10 (CCR2_HUMAN_N term), or SEQ ID NO:11 (CCR2_ MACMU_N term), preferably wherein at least Y26 has been sulfated, or
[0401] c) SEQ ID NO:12 (CCR2_MOUSE_N term), preferably wherein at least Y37 and/or Y39 has been sulfated, or
[0402] d) SEQ ID NO:16 (CCR3_HUMAN_N term), preferably wherein Y16 and/or Y17 have been sulfated, or
[0403] e) SEQ ID NO:17 (CCR3_MACFA_N term), preferably wherein Y16 has been sulfated, or
[0404] f) SEQ ID NO:18 (CCR3_MOUSE_N term), preferably wherein Y20 and/or Y22 has been sulfated, or
[0405] g) SEQ ID NO:22 (CCR4_HUMAN_N term), SEQ ID NO:23 (CCR4_MACFA_N term), or SEQ ID NO:24 (CCR4_MOUSE_N term), preferably wherein at least Y22 has been sulfated and preferably furthermore Y16, Y19 and/or Y20 have been sulfated, or
[0406] h) SEQ ID NO:28 (CCR5_HUMAN_N term), or SEQ ID NO:29 (CCR5_ MACMU_N term), preferably wherein two, three or all of Y3, Y10, Y14 and Y15 have been sulfated, or
[0407] i) SEQ ID NO:30 (CCR5_MOUSE_N term), preferably wherein two or three of Y10, Y12 and Y16 have been sulfated, or
[0408] j) SEQ ID NO:34 (CCR6_HUMAN_N term), preferably wherein at least two or three of Y18, Y26 and Y27 have been sulfated, or
[0409] k) SEQ ID NO:35 (CCR6_MACFA_N term), preferably wherein at least two or three of Y23, Y31 and Y32 have been sulfated, or
[0410] l) SEQ ID NO:36 (CCR6_MOUSE_N term), preferably wherein at least two or three of Y13, Y18 and Y19 have been sulfated, or
[0411] m) SEQ ID NO:40 (CCR7_HUMAN_N term), or SEQ ID NO:41 (CCR7_MACFA_N term), preferably wherein one or both of Y8 and Y17 have been sulfated, or
[0412] n) SEQ ID NO:42 (CCR7_MOUSE_N term), preferably wherein one or both of Y8 and Y17 and optionally Y20 have been sulfated have been sulfated, or
[0413] o) SEQ ID NO:46 (CCR8_HUMAN_N term with C=X or S), or SEQ ID NO:47 (CCR8_MACFA_N term with C=X or S), preferably wherein at least two or all of Y3, Y15 and Y17 have been sulfated, or
[0414] p) SEQ ID NO:48 (CCR8_MOUSE_N term with C=X or S), preferably wherein at least two or all of Y3, Y14 and Y15 have been sulfated, or
[0415] q) SEQ ID NO:64 (CCR9_HUMAN_N term), or SEQ ID NO:65 (CCR9_MACFA_N term), preferably wherein at least Y28, and preferably also Y17 and/or Y37 has been sulfated, or
[0416] r) SEQ ID NO:66 (CCR9_MOUSE_N term), preferably wherein at least Y28 has been sulfated, and preferably also Y19 has been sulfated, or
[0417] s) SEQ ID NO:70 (CCR10_HUMAN_N term), or SEQ ID NO:71 (CCR10_MACFA_N term), preferably wherein at least one or both of Y14 and Y22 has been sulfated, or
[0418] t) SEQ ID NO:72 (CCR10_MOUSE_N term), preferably wherein at least one, two or all of Y14, Y17 and Y22 has been sulfated, or
[0419] u) SEQ ID NO:76 (CXCR1_HUMAN_N term), preferably wherein Y27 has been sulfated, or
[0420] v) SEQ ID NO:77 (CXCR1_MACFA_N term), preferably wherein at least one of Y14 and Y28 has been sulfated, or
[0421] w) SEQ ID NO:78 (CXCR1_MOUSE_N term), preferably wherein at least Y6 has been sulfated, or
[0422] x) SEQ ID NO:82 (CXCR2_HUMAN_N term), preferably wherein Y23 and/or Y25 have been sulfated, or
[0423] y) SEQ ID NO:83 (CXCR2_MACFA_N term), preferably wherein Y20 and/or Y22 have been sulfated, or
[0424] z) SEQ ID NO:84 (CXCR2_MOUSE_N term), preferably wherein Y24 has been sulfated, or
[0425] aa) SEQ ID NO:88 (CXCR3_HUMAN_N term), SEQ ID NO:89 (CXCR3_MACFA_N term), or SEQ ID NO:90 (CXCR3_MOUSE_N term), preferably wherein at least one or both of Y27 and Y29 have been sulfated, or
[0426] bb) SEQ ID NO:94 (CXCR4_HUMAN_N term), or SEQ ID NO:95 (CXCR4_MACFA_N term), preferably wherein at least Y12 and/or Y21 have been sulfated, or
[0427] cc) SEQ ID NO:96 (CXCR4_MOUSE_N term), preferably wherein at least Y23 and/or Y14 have been sulfated, or
[0428] dd) SEQ ID NO:100 (CXCR5_HUMAN_N term), or SEQ ID NO:101 (CXCR5_MACFA_N term), preferably wherein at least one of Y3 and Y27 have been sulfated, or
[0429] ee) SEQ ID NO:102 (CXCR5_MOUSE_N term), preferably wherein at least Y3 and/or Y14 and/or Y20 and/or Y26 have been sulfated, or
[0430] ff) SEQ ID NO:106 (CXCR6_HUMAN_N term), preferably wherein at least one or both of Y6 and Y10 has been sulfated, or
[0431] gg) SEQ ID NO:107 (CXCR6_MACFA_N term), preferably wherein at least two or all of Y4, Y7 and Y39 have been sulfated, or
[0432] hh) SEQ ID NO:108 (CXCR6_MOUSE_N term), preferably wherein at least one or both of Y11 and Y15 have been sulfated, or
[0433] ii) SEQ ID NO:160 (CX3CR1_HUMAN_N term), preferably wherein at least Y14 has been sulfated, or
[0434] jj) SEQ ID NO:161 (CX3CR1_MACFA_N term), preferably wherein at least Y20 or Y22 has been sulfated, or
[0435] kk) SEQ ID NO:162 (CX3CR1_MOUSE_N term), preferably wherein at least Y15 has been sulfated, or
[0436] ll) SEQ ID NO:166 (CXCR1_HUMAN_N term), preferably wherein at least Y27 has been sulfated, or
[0437] mm) SEQ ID NO:167 (CXCR1_MACMU_N term), preferably wherein at least Y14 or Y28 has been sulfated, or
[0438] nn) SEQ ID NO:168 (CXCR1_MOUSE_N term), preferably wherein at least Y6 has been sulfated.

[0439] In some of the first, second, third or fourth embodiments of the first aspect, the isolated sulfated polypeptide comprises a sequence according to or having at least 90% sequence identity with
[0440] a) SEQ ID NO:1 (CCR1_HUMAN_TRD), SEQ ID NO:4 (CCR1_HUMAN_N term), SEQ ID NO:2 (CCR1_MACFA_TRD), SEQ ID NO:5 (CCR1_MACFA_N term), SEQ ID NO:3 (CCR1_MOUSE_TRD) or SEQ ID NO:6 (CCR1_MOUSE_N term), preferably wherein at least Y10 and/or Y18 have been sulfated, or
[0441] b) SEQ ID NO:7 (CCR2_HUMAN_TRD), SEQ ID NO:10 (CCR2_HUMAN_N term), SEQ ID NO:8 (CCR2_MACMU_TRD) or SEQ ID NO:11 (CCR2_ MACMU_N term), preferably wherein at least Y26 has been sulfated, or
[0442] c) SEQ ID NO:9 (CCR2_MOUSE_TRD) or SEQ ID NO:12 (CCR2_MOUSE_N term), preferably wherein at least Y37 and/or Y39 has been sulfated, or
[0443] d) SEQ ID NO:13 (CCR3_HUMAN_TRD) or SEQ ID NO:16 (CCR3_HUMAN_N term), preferably wherein Y16 and/or Y17 have been sulfated, or
[0444] e) SEQ ID NO:14 (CCR3_MACFA_TRD) or SEQ ID NO:17 (CCR3_MACFA_N term), preferably wherein Y16 has been sulfated, or
[0445] f) SEQ ID NO:15 (CCR3_MOUSE_TRD) or SEQ ID NO:18 (CCR3_MOUSE_N term), preferably wherein Y20 and/or Y22 have been sulfated, or
[0446] g) SEQ ID NO:19 (CCR4_HUMAN_TRD), SEQ ID NO:22 (CCR4_HUMAN_N term), SEQ ID NO:20 (CCR4_MACFA_TRD), SEQ ID NO:23 (CCR4_MACFA_N term), SEQ ID NO:21 (CCR4_MOUSE_TRD) or SEQ ID NO:24 (CCR4_MOUSE_N term), preferably wherein at least Y22 has been sulfated and preferably furthermore Y16, Y19 and/or Y20 have been sulfated, or
[0447] h) SEQ ID NO:25 (CCR5_HUMAN_TRD), SEQ ID NO:28 (CCR5_HUMAN_N term), SEQ ID NO:26 (CCR5_MACMU_TRD) or SEQ ID NO:29 (CCR5_ MACMU_N term), preferably wherein two, three or all of Y3, Y10, Y14 and Y15 have been sulfated, or
[0448] i) SEQ ID NO:27 (CCR5_MOUSE_TRD) or SEQ ID NO:30 (CCR5_MOUSE_N term), preferably wherein two or three of Y10, Y12 and Y16 have been sulfated, or
[0449] j) SEQ ID NO:31 (CCR6_HUMAN_TRD) or SEQ ID NO:34 (CCR6_HUMAN_N term), preferably wherein at least two or three of Y18, Y26 and Y27 have been sulfated, or
[0450] k) SEQ ID NO:32 (CCR6_MACFA_TRD) or SEQ ID NO:35 (CCR6_MACFA_N term), preferably wherein at least two or three of Y23, Y31 and Y32 have been sulfated, or
[0451] l) SEQ ID NO:33 (CCR6_MOUSE_TRD) or SEQ ID NO:36 (CCR6_MOUSE_N term), preferably wherein at least two or three of Y13, Y18 and Y19 have been sulfated, or
[0452] m) SEQ ID NO:37 (CCR7_HUMAN_TRD), SEQ ID NO:40 (CCR7_HUMAN_N term), SEQ ID NO:38 (CCR7_MACFA_TRD) or SEQ ID NO:41 (CCR7_MACFA_N term), preferably wherein one or both of Y8 and Y17 have been sulfated, or
[0453] n) SEQ ID NO:39 (CCR7_MOUSE_TRD) or SEQ ID NO:42 (CCR7_MOUSE_N term), preferably wherein one or both of Y8 and Y17 and optionally Y20 have been sulfated have been sulfated, or
[0454] o) SEQ ID NO:43 (CCR8_HUMAN_TRD), SEQ ID NO:44 (CCR8_MACFA_TRD), SEQ ID NO:46 (CCR8_HUMAN_N term with C=X or S), or SEQ ID NO:47 (CCR8_MACFA_N term with C=X or S), preferably wherein at least two or all of Y3, Y15 and Y17 have been sulfated, or
[0455] p) SEQ ID NO:45 (CCR8_MOUSE_TRD) or SEQ ID NO:48 (CCR8_MOUSE_N term with C=X or S), preferably wherein at least two or all of Y3, Y14 and Y15 have been sulfated, or
[0456] q) SEQ ID NO:61 (CCR9_HUMAN_TRD), SEQ ID NO:64 (CCR9_HUMAN_N term), SEQ ID NO:62 (CCR9_MACFA_TRD) or SEQ ID NO:65 (CCR9_MACFA_N term), preferably wherein at least Y28, and preferably also Y17 and/or Y37 has been sulfated, or
[0457] r) SEQ ID NO:63 (CCR9_MOUSE_TRD) or SEQ ID NO:66 (CCR9_MOUSE_N term), preferably wherein at least Y28 has been sulfated, and preferably also Y19 has been sulfated, or
[0458] s) SEQ ID NO:67 (CCR10_HUMAN_TRD), SEQ ID NO:70 (CCR10_HUMAN_N term), SEQ ID NO:68 (CCR10_MACFA_TRD) or SEQ ID NO:71 (CCR10_MACFA_N term), preferably wherein at least one or both of Y14 and Y22 has been sulfated, or
[0459] t) SEQ ID NO:69 (CCR10_MOUSE_TRD) or SEQ ID NO:72 (CCR10_MOUSE_N term), preferably wherein at least one, two or all of Y14, Y17 and Y22 has been sulfated, or
[0460] u) SEQ ID NO:73 (CXCR1_HUMAN_TRD) or SEQ ID NO:76 (CXCR1_HUMAN_N term), preferably wherein Y27 has been sulfated, or
[0461] v) SEQ ID NO:74 (CXCR1_MACFA_TRD) or SEQ ID NO:77 (CXCR1_MACFA_N term), preferably wherein at least one of Y14 and Y28 has been sulfated, or
[0462] w) SEQ ID NO:75 (CXCR1_MOUSE_TRD) or SEQ ID NO:78 (CXCR1_MOUSE_N term), preferably wherein at least Y6 has been sulfated, or
[0463] x) SEQ ID NO:79 (CXCR2_HUMAN_TRD) or SEQ ID NO:82 (CXCR2_HUMAN_N term), preferably wherein Y23 and/or Y25 have been sulfated, or
[0464] y) SEQ ID NO:80 (CXCR2_MACFA_TRD) or SEQ ID NO:83 (CXCR2_MACFA_N term), preferably wherein Y20 and/or Y22 have been sulfated, or
[0465] z) SEQ ID NO:81 (CXCR2_MOUSE_TRD) or SEQ ID NO:84 (CXCR2_MOUSE_N term), preferably wherein Y24 has been sulfated, or
[0466] aa) SEQ ID NO:85 (CXCR3_HUMAN_TRD), SEQ ID NO:88 (CXCR3_HUMAN_N term), SEQ ID NO:86 (CXCR3_MACFA_TRD), SEQ ID NO:89 (CXCR3_MACFA_N term), SEQ ID NO:87 (CXCR3_MOUSE_TRD) or SEQ ID NO:90 (CXCR3_MOUSE_N term), preferably wherein at least one or both of Y27 and Y29 have been sulfated, or
[0467] bb) SEQ ID NO:91 (CXCR4_HUMAN_TRD), SEQ ID NO:94 (CXCR4_HUMAN_N term), SEQ ID NO:92 (CXCR4_MACFA_TRD) or SEQ ID NO:95 (CXCR4_MACFA_N term), preferably wherein at least Y12 and/or Y21 have been sulfated, or
[0468] cc) SEQ ID NO:93 (CXCR4_MOUSE_TRD) or SEQ ID NO:96 (CXCR4_MOUSE_N term), preferably wherein at least Y23 and/or Y14 have been sulfated, or
[0469] dd) SEQ ID NO:97 (CXCR5_HUMAN_TRD), SEQ ID NO:100 (CXCR5_HUMAN_N term), SEQ ID NO:98 (CXCR5_MACFA_TRD) or SEQ ID NO:101 (CXCR5_MACFA_N term), preferably wherein at least one of Y3 and Y27 have been sulfated, or
[0470] ee) SEQ ID NO:99 (CXCR5_MOUSE_TRD) or SEQ ID NO:102 (CXCR5_MOUSE_N term), preferably wherein at least Y3 and/or Y14 and/or Y20 and/or Y26 have been sulfated, or
[0471] ff) SEQ ID NO:103 (CXCR6_HUMAN_TRD) or SEQ ID NO:106 (CXCR6_HUMAN_N term), preferably wherein at least one or both of Y6 and Y10 has been sulfated, or
[0472] gg) SEQ ID NO:104 (CXCR6_MACFA_TRD) or SEQ ID NO:107 (CXCR6_MACFA_N term), preferably wherein at least two or all of Y4, Y7 and Y39 have been sulfated, or
[0473] hh) SEQ ID NO:105 (CXCR6_MOUSE_TRD) or SEQ ID NO:108 (CXCR6_MOUSE_N term), preferably wherein at least one or both of Y11 and Y15 have been sulfated, or
[0474] ii) SEQ ID NO:157 (CX3CR1_HUMAN_TRD) or SEQ ID NO:160 (CX3CR1_HUMAN_N term), preferably wherein at least Y14 has been sulfated, or
[0475] jj) SEQ ID NO:158 (CX3CR1_MACFA_TRD), preferably wherein at least Y20 has been sulfated, or
[0476] kk) SEQ ID NO:161 (CX3CR1_MACFA_N term), preferably wherein at least Y20 or Y22 has been sulfated, or
[0477] ll) SEQ ID NO:159 (CX3CR1_MOUSE_TRD) or SEQ ID NO:162 (CX3CR1_MOUSE_N term), preferably wherein at least Y15 has been sulfated, or
[0478] mm) SEQ ID NO:163 (CXCR1_HUMAN_TRD) or SEQ ID NO:166 (CXCR1_HUMAN_N term), preferably wherein at least Y27 has been sulfated, or
[0479] nn) SEQ ID NO:164 (CXCR1_MACMU_TRD), preferably wherein at least Y14 has been sulfated or
[0480] oo) SEQ ID NO:167 (CXCR1_MACMU_N term), preferably wherein at least Y14 or Y28 has been sulfated, or
[0481] pp) SEQ ID NO:165 (CXCR1_MOUSE_TRD) or SEQ ID NO:168 (CXCR1_MOUSE_N term), preferably wherein at least Y6 has been sulfated.

[0482] Preferably, the isolated polypeptide according to the current aspect is immobilized, e.g. via a linker. Immobilization may occur without limitation on suitable beads, particles, proteins, or solid supports.

### Aspect 2—Conjugate Comprising Isolated Polypeptide

[0483] According to a second aspect of the current invention, there is provided a conjugate comprising an isolated sulfated polypeptide according to the first aspect.

[0484] For example, the conjugate may comprise a polypeptide according to the first embodiments of the first aspect. For example, the conjugate may comprise a polypeptide according to the second embodiments of the first aspect. For example, the conjugate may comprise a polypeptide according to the third embodiments of the first aspect. For example, the conjugate may comprise a polypeptide according to some embodiments A, B, C of the third embodiments of the first aspect. For example, the conjugate may comprise a polypeptide according to the fourth embodiments of the first aspect. For example, the conjugate may comprise a polypeptide according to some embodiments A, B, C of the fourth embodiments of the first aspect.

[0485] For example, the isolated sulfated polypeptide may be attached to a tag or linker for immobilization or retrieval. Suitable tags are selected from the tags known in the art, for example small organic molecules like biotin (which binds strongly and non-covalently to streptavidin), derivatives thereof, or short peptide sequence such as Flag tag, HA tag, Myc tag or His tag (cf. Table 4.1 or example 10.1.2). For some applications, the tag can be a protein, such as human serum albumin (cf. Table 4.1 or example 10.1.2), or a carrier protein, such as KLH, OVA or BSA, or a larger structure such as a bead or magnetic particle. Preferably, the tag can be attached via the C term or at the N term of the TRD or the N terminus of the chemokine receptor but may also be attached via a reactive residue or amino acid side chain, such as a lysine within the TRD. In some embodiments, the tag is attached via a linker, which can be any linker known in the art. Suitable linker include trioxatridecan-succinamic acid (Ttds) linker (cf. Table 4.1), beta-alanine, GABA, AEA, Ava, Ahx, PEG2 spacer, PEG3 spacer, PEG4 spacer, O1Pen, O2Oc or O1Pen-O1.

### Aspect 3—Antigen Production Method

[0486] Sulfated peptides may be difficult to synthesize e.g. because the sulfate is unstable under acidic conditions (Houben-Weyl, Methods of Organic Chemistry Vol. E 22b, Synthesis of Peptides and Peptidomimetics, 4^{th} Edition, section 6.6.1.2 Synthesis of Sulfated Tyrosine Peptides with Tyrosine O-Sulfate Synthons, p.440 ff. in: Felix, Arthur et al.:2004).

[0487] According to a 3rd aspect there is provided a method for production of the isolated sulfated polypeptide according to the first aspect or conjugate according to the second aspect, wherein the method comprises synthesis of the isolated polypeptide and sulfation of the respective tyrosine residues.

[0488] Synthesis of the isolated polypeptide according to the first aspect and sulfation of the respective tyrosine residues may occur as described in example 5, or may occur according to any other method known in the art. In chapter 6.6.1 “Methods of Organic Chemistry Vol. E 22b, Synthesis of Peptides and Peptidomimetics”, Houben-Weyl describe various chemical approaches for the synthesis of sulfated tyrosine peptides. The chapter, and in particular these methods, are incorporated herein by reference in their entirety.

[0489] For example, synthesis may be performed using the sequence independent solid phase method previously described by Bunschoten et al. (Bunschoten, Anton, et al. “A general sequence independent solid phase method for the site specific synthesis of multiple sulfated-tyrosine containing peptides.” Chemical communications 21 (2009): 2999-3001), incorporated herein in its entirety. In brief, a peptide is synthesized according to the Fmoc-tBu-strategy, followed by selective deprotection of the tyrosine residues to be sulfated and introduction of a protected sulfate group. Upon completion of the synthesis of the sulfated peptide, it is cleaved from the resin by acidolysis and protection groups are removed with the exception of the sulfate protection group, thereby preventing undesired acid induced removal of the sulfate group(s) during this step. Finally, the sulfate protecting groups can be removed in a slightly acidic reductive step, leaving the sulfate groups untouched.

[0490] Chen et al. have reported a short and efficient one-step route to sY-containing peptides, wherein Fmoc-protected fluorosulfated tyrosine (Y(OSO2F)) is incorporated into the peptide of interest through an Fmoc-based solid-phase synthetic strategy (cf. Chen, Wentao, et al. “Synthesis of Sulfotyrosine-Containing Peptides by Incorporating Fluorosulfated Tyrosine Using an Fmoc-Based Solid-Phase Strategy.” Angewandte Chemie 128.5 (2016): 1867-1870), incorporated herein in its entirety. Standard simultaneous peptide-resin cleavage and removal of the acid-labile side-chain protecting groups yield the crude peptides containing fluorosulfated tyrosine. Basic ethylene glycol, serving as solvent and reactant, transforms the fluorosulfated tyrosine peptides into sulfotyrosine peptides in high yield.

[0491] Global sulfation of polypeptides is likewise possible, for example using sulfur trioxide-pyridine. According to the current invention, this route can be used, if all tyrosines have to be sulfated or if “crude” mixtures of partially sulfated polypeptides shall be used for further steps. Furthermore, sulfation may occur enzymatically, e.g. in a biotransformation reaction using the natural sulfation enzymes or engineered versions thereof. Preferably, the sulfation of the respective tyrosine may occur chemically or enzymatically. Preferably, the synthesis of the isolated polypeptide occurs using Fmoc-tBu-strategy.

[0492] According to some embodiments of the 3rd aspect, the method comprises purifying the obtained polypeptides. Purification may occur for example by HPLC, e.g. using a C18 column. According to some embodiments of the 3rd aspect, the method comprises analytical characterization of the polypeptide. Without limitation, analytical characterization may be performed using spectroscopic methods or mass spectrometry.

### Aspect 4—Uses of the Antigen/Methods Compr. Use of the Antigen

[0493] According to a 4^{th} aspect there is provided the use of the isolated sulfated polypeptide according to the first aspect or conjugate according to the second aspect for antibody generation, as antigen or for off-target panning, and/or for characterization of an antibody. For example, the isolated sulfated polypeptide according to the first aspect or conjugate according to the second aspect can be used for the generation of a fully human antibody or a fragment thereof. For example, the isolated sulfated polypeptide according to the first aspect or conjugate according to the second aspect can be used for the generation of a cross reactive antibody.

[0494] According to some first embodiments according to the 4^{th} aspect, there is provided the use of the isolated sulfated polypeptide according to the first aspect or conjugate according to the second aspect for antibody generation. In particular, the isolated sulfated polypeptide according to the first aspect may be used to facilitate the generation of antibodies specifically recognizing chemokine receptors, as described elsewhere herein.

[0495] According to some second embodiments according to the 4^{th} aspect, which may be the same as or different from the first embodiments according to the 4^{th} aspect, the isolated sulfated polypeptide according to the first aspect or conjugate according to the second aspect is used as antigen, e.g. to select antibodies, antibody fragments or molecules specifically binding to chemokine receptors, cf examples 6 and 8.

[0496] According to some third embodiments according to the 4^{th} aspect, which may be the same as or different from the first and/or second embodiments according to the 4^{th} aspect, the isolated sulfated polypeptide according to the first aspect or conjugate according to the second aspect is used for off-target panning to select antibodies which do not bind a certain seven transmembrane receptor, e.g. a chemokine receptor (off-target receptor), cf examples 6 and 8.

[0497] According to some fourth embodiments, the method according to the 4^{th} aspect comprises the use of the isolated sulfated polypeptide according to the first aspect or conjugate according to the second aspect for characterization of an antibody. Preferably, the antibody is an antibody according to the current invention. For example, the characterization of the antibody may comprise the use of ELISA, surface plasmon resonance, mass spectrometry, competition assays, staining, IHC, FACS, or various further assays known in the art.

### Aspect 5—Antibody Production Method

[0498] According to a 5^{th} aspect, there is provided a method for obtaining an antibody or binder, the method comprising the use of the isolated sulfated polypeptide according to the first aspect or conjugate according to the second aspect.

[0499] According to some first embodiments, the method according to the 5^{th} aspect comprises the use of the isolated sulfated polypeptide according to the first aspect or conjugate according to the second aspect as antigen.

[0500] According to some preferred of the first embodiments of the 5^{th} aspect, the method comprises the use of at least one further isolated polypeptide or conjugate thereof, wherein the at least one further isolated polypeptide comprises a TRD
[0501] a) of a seven transmembrane receptor different from the first seven transmembrane receptor, or
[0502] b) of the first seven transmembrane receptor derived from a different species, preferably wherein the at least one further isolated polypeptide is an isolated polypeptide according to the first aspect.

[0503] According to some embodiments A of the first embodiments of the 5^{th} aspect, the method comprises the use of at least one further isolated polypeptide or conjugate, preferably according to the first or second aspect, preferably either as antigen or for off-target selection. For these embodiments, the first isolated sulfated polypeptide comprises a TRD of a first seven transmembrane receptor (e.g. a chemokine receptor) and the further isolated polypeptide or conjugate comprises a TRD of a seven transmembrane receptor different from the first seven transmembrane receptor. Where the further isolated polypeptide or conjugate is used as antigen, the method is a method for the production of antibodies or binders recognizing at least two different seven transmembrane receptors, e.g. two different chemokine receptor family members. Where the further isolated polypeptide or conjugate is used for off target panning, the method is a method for the production of antibodies or binders recognizing only a specific seven transmembrane receptor, e.g. to avoid off target binding to the further chemokine receptor family members.

[0504] According to some embodiments B of the first embodiments of the 5^{th} aspect, the method comprises the use of at least one further isolated polypeptide or conjugate, preferably according to the first or second aspect, either as antigen or for off-target selection. For these embodiments, the first isolated polypeptide comprises a TRD of a first seven transmembrane receptor of a first species (e.g. a human chemokine receptor) and the further isolated polypeptide comprises a TRD of the same seven transmembrane receptor derived from a different species (e.g. a cynomolgus chemokine receptor). For example, the first polypeptide may comprise the TRD of a human chemokine receptor, and the second polypeptide may comprise the TRD of a cynomolgus chemokine receptor.

[0505] These embodiments B are of particular advantage, because the generation of chemokine receptor antibodies or binders which are cross reactive for both human and a suitable model species is difficult for chemokine receptors, in particular for CCR8. While the overall consensus between the transmembrane domains is comparably high, the extracellular domains of chemokine receptors have a low consensus between the different chemokine receptor family members, and also between the species for a given chemokine receptor (FIG. 1, FIG. 2a). However, according to the current invention it was now found, that small sulfated tyrosine comprising motifs within the TRD are sufficiently conserved for a given chemokine receptor to be used to obtain high numbers of cross-reactive antibodies. Example 6 describes the generation of cross-reactive antibodies for human and cynomolgus, and example 10.1.1 shows excellent affinities in both species for various antibodies according to the current invention. Compared with rodents and mice, cynomolgus is a preferred model system, because mouse models have failed to predict immunological side effects.

[0506] The method according to the 5^{th} aspect may be any method for antibody generation known in the art. For example, the method may be a conventional immunization method, e.g. wherein the polypeptide according to the first aspect is conjugated to KLH and is administered to a suitable animal for immunization. For example, after immunization, the splenocytes of the immunized animals can be used for the generation of hybridoma cells, which produce the antibodies of the animals, and in a second step can be screened for antibodies specifically binding to the antigen by methods known in the art like e.g. ELISA as well as binding to an off-target, if applicable. Alternatively, the splenocytes can be directly screened for the production of antibodies binding to the antigen in droplet based microfluidic systems or in cell culture assays. Afterwards only selected splenocytes are directly applied to sequencing to obtain the sequence of the antibody or hybridoma generation. Another method can comprise using the antigen for panning with an antibody library which for example can be a phage display library, e.g. without limitation as described elsewhere herein, or alternatively a mammalian library. After panning of the library on the antigen the enriched antibodies can be screened for specific binding to the antigen by methods known in the art like e.g. ELISA or SPR, as described in more detail herein.

[0507] According to some second embodiments of the 5^{th} aspect, which may be the same as or different from the first embodiments of the 5^{th} aspect, the method for obtaining an antibody according to the 5^{th} aspect, is a method comprising the use of a phage display library, a transgenic animal, or any other technique available in the art for the generation of antibodies comprising human CDRs.

[0508] In some embodiments A of the second embodiments of the 5^{th} aspect, the method comprises the use of a human phage display library, cf. example 6 and example 8. For example, the phage display library can be a fully human antibody phage display library, such as the BioInvent n-CoDeR Fab lambda library. In some preferred embodiments, the Phage display library is enriched for tyrosine and/or histidine content. In a first step, the phage display library comprising bacteriophages displaying antibodies or antibody fragments on their outside may be combined with the immobilized isolated polypeptide according to the first aspect or conjugate according to the second aspect to allow binding to the isolated polypeptide or conjugate.

[0509] In an optional second depletion step, which may occur before or after the first step, the phage display library comprising bacteriophages displaying antibodies or antibody fragments on their outside may be combined with an immobilized isolated polypeptide or conjugate according to the first aspect, being different from the isolated polypeptide of the first step, to deplete off-target binders.

[0510] In an optional third step, which may occur before or after the first step, or may occur before or after the second step, the phage display library comprising bacteriophages displaying antibodies or antibody fragments on their outside may be combined with an immobilized isolated polypeptide according to the first aspect or conjugate according to the second aspect being different from the isolated polypeptide of the first step and from the isolated polypeptide of the optional second step, to obtain cross reactive binders. Each of the steps may be repeated multiple times, e.g. one, two, three, four, five, six, seven eight, nine, ten or more times. Binding antibodies or fragments can be retrieved for expansion by infection of suitable bacterial hosts and the DNA can be sequenced as known in the art to obtain the sequence of the seven transmembrane receptor antibody or fragment.

[0511] In some embodiments B of the second embodiments of the 5^{th} aspect, the method for obtaining an antibody according to the 5^{th} aspect, is a method comprising the use of transgenic animals as described by Lonberg (Lonberg, Nils. “Human antibodies from transgenic animals.” Nature biotechnology 23.9 (2005): 1117-1125), incorporated herein in its entirety. For example, the transgenic animal may be a XenoMouse (Abgenix Inc., Fremont, Calif., e.g. U.S. Pat. No. 5,939,598), the HuMAb Mouse (GenPharm-Medarex, San Jose, Calif.), the RenMab Mouse (Biocytogen), or any other animal known in the art for the generation of fully human antibodies.

[0512] In some embodiments C of the second embodiments of the 5^{th} aspect, the method for obtaining an antibody according to the 5^{th} aspect, is a method comprising the use of in vitro activated B cells (see, U.S. Pat. Nos. 5,567,610 and 5,229,275, each of which is incorporated herein by reference in its entirety). According to some third embodiments of the 5^{th} aspect there is provided a method for obtaining an antibody or antibody fragment or a binder, which specifically binds to a human and/or cynomolgus and/or murine CC or CXC chemokine receptor, the method comprising
[0513] a) (synthetically) sulfating a polypeptide comprising a tyrosine rich domain (TRD) and
[0514] b) selection of an antibody, antibody fragment or binder recognizing the sulfated polypeptide, and
[0515] c) optionally producing the antibody, antibody fragment or binder.

[0516] In some embodiments, the use according to the 4^{th} aspect, or the method according to the 5^{th} aspect is a use/method to obtain an antibody with favorable properties as described elsewhere herein, preferably wherein the antibody
[0517] a) comprises human derived CDRs, and/or
[0518] b) is a human, rat or murine IgG antibody, preferably a human IgG1 antibody or a murine IgG2a antibody, and/or
[0519] c) is cross reactive for two different seven transmembrane receptors, and/or
[0520] d) is cross reactive for a human and a cynomolgus seven transmembrane receptor, and/or
[0521] e) is characterized by a HCDR3 region comprising between 10 and 34% of tyrosine and/or between 2 and 20% of histidine, preferably between 7 and 20% of histidine and/or
[0522] f) does not modulate G protein independent signaling of the chemokine receptor, and/or
[0523] g) is a non-internalizing antibody or is characterized by an internalization into a cell with endogenous target expression which is lower than the 1.5, 2, 3, 4, 5, 6, 7, or 10-fold of the internalization of the isotype control.

[0524] The method according to the current aspect can be used to obtain high numbers of antibodies binding chemokine receptors. Interestingly, a comparably high number of these antibodies were characterized by properties differentiating them from the known antibodies obtained with conventional methods as described elsewhere herein.

### Aspect 6—Antibody Defined by Antigen

[0525] According to the current invention, there is provided an isolated antibody or antigen-binding fragment thereof or a binder obtained with a method or use according to a previous aspect.

[0526] As will be appreciated by skilled artisans, antibodies and/or binding fragments are “modular” in nature. Throughout the disclosure, various specific aspects and embodiments of the various “modules” composing the antibodies and/or binding fragments are described. As specific non-limiting examples, various specific embodiments of VH CDRs, VH chains, VL CDRs and VL chains or functional features are described. It is intended that all of the specific embodiments may be combined with each other as though each specific combination were explicitly described individually. As specific non-limiting examples, various specific functional embodiments are described. It is intended that all of the specific embodiments may be combined with each other as though each specific combination were explicitly described individually.

[0527] According to a 6^{th} aspect, there is provided an isolated antibody or antigen-binding fragment thereof, (specifically) binding to a first isolated sulfated polypeptide which comprises the tyrosine rich domain (TRD) of a seven transmembrane receptor, wherein at least 25%, at least 50% or at least 75% of the tyrosine residues of the TRD are sulfated. Preferably, the first isolated sulfated polypeptide furthermore comprises the LID domain of the seven transmembrane receptor. Preferably, the cysteine between the TRD and the LID domain has been removed or has been exchanged into a different amino acid.

[0528] Preferably, the first isolated sulfated polypeptide comprises the N terminus of a seven transmembrane receptor including its tyrosine rich domain (TRD) and optionally including its LID domain, and even more preferably, at least 25%, at least 50% or at least 75% of the tyrosine residues of the TRD are sulfated. In preferred embodiments, the isolated antibody or antigen-binding fragment thereof binds its target(s) with a KD value of <5E-8 M, <4E-8 M, <3E-8 M, <2E-8 M, <1E-8 M, <9E-9 M, <8E-9 M, <7E-9 M, <6E-9 M, <5E-9 M, <4E-9 M, <3E-9 M, <2.5E-9 M, <2E-9 M, <1.5E-9 M, <1E-9 M, <9E-10 M, <8E-10 M, <7E-10 M, <6E-10 M, <5E-10 M, <4E-10 M, <3E-10 M, <2.5E-10 M, <2E-10 M, <1.5E-10 M, <1E-10 M, or <9E-11 M. For example, the inventive antibody may bind its target(s) with a KD value between <8E-9 M and >4E-10 M. Where the isolated antibody or antigen-binding fragment thereof binds more than one target, most preferably it binds its' targets with an affinity in the same order of magnitude.

[0529] According to some preferred embodiments, the isolated antibody or antigen-binding fragment thereof
[0530] a) comprises human derived CDRs, and/or
[0531] b) is cross reactive for human and cynomolgus, and/or
[0532] c) is characterized by a HCDR3 region comprising between 10 and 34% of tyrosine and/or between 7 and 20% of histidine, and/or
[0533] d) does not modulate G protein independent signaling of the seven transmembrane receptor, and/or
[0534] e) is a non-internalizing antibody or is characterized by an internalization into a cell with endogenous target expression which is lower than the 1.5, 2, 3, 4, 5, 6, 7, or 10-fold of the internalization of the isotype control, and/or
[0535] f) induces ADCC and/or ADCP and/or
[0536] g) is a human, rat or murine IgG antibody, preferably a human IgG1 antibody or a murine IgG2a antibody, and/or
[0537] h) is an scFv, Fab, Fab′ or a F(ab′)2 fragment.

[0538] According to some first embodiments of the 6^{th} aspect, the seven transmembrane receptor is a chemokine receptor. In some of these first embodiments, the seven transmembrane receptor is a CC chemokine receptor or a CXC chemokine receptor. In some of these first embodiments, the seven transmembrane receptor is a CC chemokine receptor, such as CCR1, CCR2, CCR3, CCR4, CCR5, CCR6, CCR7, CCR8, CCR9 or CCR10. In some preferred of these first embodiments, the seven transmembrane receptor is CCR8 or CCR4. In some most preferred of these first embodiments, the seven transmembrane receptor is CCR8. In some of the first embodiments, the seven transmembrane receptor is a CXC chemokine receptor, such as CXCR1, CXCR2, CXCR3, CXCR4, CXCR5, or CXCR6. In some of the first embodiments, the seven transmembrane receptor is CX3CR1 or CXCR1.

[0539] According to some second embodiments of the 6^{th} aspect, which may or may not be the same as the first embodiments of the 6^{th} aspect, the seven transmembrane receptor may be from any species expressing chemokine receptors characterized by a TRD, e.g. human, monkey, Macaca fascicularis (cynomolgus monkey), Macaca mulatta (rhesus macaque), rodent, mouse, rat, horse, bovine, pig, dog, cat and camel. In some of these second embodiments of the 6^{th} aspect, the seven transmembrane receptor is murine. In some most preferred of these second embodiments of the sixth aspect, the seven transmembrane receptor is human. In some of these second embodiments of the sixth aspect, the seven transmembrane receptor is cynomolgus. In some preferred of these embodiments, the seven transmembrane receptor is human, cynomolgus or mouse. In some of these preferred second embodiments of the sixth aspect, the seven transmembrane receptor is human or cynomolgus.

[0540] In some preferred embodiments, the seven transmembrane receptor is a human, cynomolgus or mouse seven transmembrane receptor and the seven transmembrane receptor is
[0541] a) a CC chemokine receptor, preferably CCR1, CCR2, CCR3, CCR4, CCR5, CCR6, CCR7, CCR5, CCR5 or CCR10,
[0542] b) a CXC chemokine receptor, preferably CXCR1, CXCR2, CXCR3, CXCR4, CXCR5, or CXCR6, or
[0543] c) CX3CR1 or CXCR1.

[0544] According to some third embodiments of the 6^{th} aspect, which may be or may not be the same as the first and/or second embodiments according to the 6^{th} aspect, the (first) isolated sulfated polypeptide comprises or consists of a sequence according to
[0545] a) SEQ ID NO:1 (CCR1_HUMAN_TRD), SEQ ID NO:4 (CCR1_HUMAN_N term), SEQ ID NO:2 (CCR1_MACFA_TRD), SEQ ID NO:5 (CCR1_MACFA_N term), SEQ ID NO:3 (CCR1_MOUSE_TRD) or SEQ ID NO:6 (CCR1_MOUSE_N term), preferably wherein at least Y10 and/or Y18 have been sulfated, or
[0546] b) SEQ ID NO:7 (CCR2_HUMAN_TRD), SEQ ID NO:10 (CCR2_HUMAN_N term), SEQ ID NO:8 (CCR2_MACMU_TRD) or SEQ ID NO:11 (CCR2_ MACMU_N term), preferably wherein at least Y26 has been sulfated, or
[0547] c) SEQ ID NO:9 (CCR2_MOUSE_TRD) or SEQ ID NO:12 (CCR2_MOUSE_N term), preferably wherein at least Y37 and/or Y39 has been sulfated, or
[0548] d) SEQ ID NO:13 (CCR3_HUMAN_TRD) or SEQ ID NO:16 (CCR3_HUMAN_N term), preferably wherein Y16 and/or Y17 have been sulfated, or
[0549] e) SEQ ID NO:14 (CCR3_MACFA_TRD) or SEQ ID NO:17 (CCR3_MACFA_N term), preferably wherein Y16 has been sulfated, or
[0550] f) SEQ ID NO:15 (CCR3_MOUSE_TRD) or SEQ ID NO:18 (CCR3_MOUSE_N term), preferably wherein Y20 and/or Y22 has been sulfated, or
[0551] g) SEQ ID NO:19 (CCR4_HUMAN_TRD), SEQ ID NO:22 (CCR4_HUMAN_N term), SEQ ID NO:20 (CCR4_MACFA_TRD), SEQ ID NO:23 (CCR4_MACFA_N term), SEQ ID NO:21 (CCR4_MOUSE_TRD) or SEQ ID NO:24 (CCR4_MOUSE_N term), preferably wherein at least Y22 has been sulfated and preferably furthermore Y16, Y19 and/or Y20 have been sulfated, or
[0552] h) SEQ ID NO:25 (CCR5_HUMAN_TRD), SEQ ID NO:28 (CCR5_HUMAN_N term), SEQ ID NO:26 (CCR5_MACMU_TRD) or SEQ ID NO:29 (CCR5_ MACMU_N term), preferably wherein two, three or all of Y3, Y10, Y14 and Y15 have been sulfated, or
[0553] i) SEQ ID NO:27 (CCR5_MOUSE_TRD) or SEQ ID NO:30 (CCR5_MOUSE_N term), preferably wherein two or three of Y10, Y12 and Y16 have been sulfated, or
[0554] j) SEQ ID NO:31 (CCR6_HUMAN_TRD) or SEQ ID NO:34 (CCR6_HUMAN_N term), preferably wherein at least two or three of Y18, Y26 and Y27 have been sulfated, or
[0555] k) SEQ ID NO:32 (CCR6_MACFA_TRD) or SEQ ID NO:35 (CCR6_MACFA_N term), preferably wherein at least two or three of Y23, Y31 and Y32 have been sulfated, or
[0556] l) SEQ ID NO:33 (CCR6_MOUSE_TRD) or SEQ ID NO:36 (CCR6_MOUSE_N term), preferably wherein at least two or three of Y13, Y18 and Y19 have been sulfated, or
[0557] m) SEQ ID NO:37 (CCR7_HUMAN_TRD), SEQ ID NO:40 (CCR7_HUMAN_N term), SEQ ID NO:38 (CCR7_MACFA_TRD) or SEQ ID NO:41 (CCR7_MACFA_N term), preferably wherein one or both of Y8 and Y17 have been sulfated, or
[0558] n) SEQ ID NO:39 (CCR7_MOUSE_TRD) or SEQ ID NO:42 (CCR7_MOUSE_N term), preferably wherein one or both of Y8 and Y17 and optionally Y20 have been sulfated have been sulfated, or
[0559] o) SEQ ID NO:43 (CCR8_HUMAN_TRD), SEQ ID NO:44 (CCR8_MACFA_TRD), SEQ ID NO:46 (CCR8_HUMAN_N term with C=X or S), or SEQ ID NO:47 (CCR8_MACFA_N term with C=X or S), preferably wherein at least two or all of Y3, Y15 and Y17 have been sulfated, or
[0560] p) SEQ ID NO:45 (CCR8_MOUSE_TRD) or SEQ ID NO:48 (CCR8_MOUSE_N term with C=X or S), preferably wherein at least two or all of Y3, Y14 and Y15 have been sulfated, or
[0561] q) SEQ ID NO:61 (CCR9_HUMAN_TRD), SEQ ID NO:64 (CCR9_HUMAN_N term), SEQ ID NO:62 (CCR9_MACFA_TRD) or SEQ ID NO:65 (CCR9_MACFA_N term), preferably wherein at least Y28, and preferably also Y17 and/or Y37 has been sulfated, or
[0562] r) SEQ ID NO:63 (CCR9_MOUSE_TRD) or SEQ ID NO:66 (CCR9_MOUSE_N term), preferably wherein at least Y28 has been sulfated, and preferably also Y19 has been sulfated, or
[0563] s) SEQ ID NO:67 (CCR10_HUMAN_TRD), SEQ ID NO:70 (CCR10_HUMAN_N term), SEQ ID NO:68 (CCR10_MACFA_TRD) or SEQ ID NO:71 (CCR10_MACFA_N term), preferably wherein at least one or both of Y14 and Y22 has been sulfated, or
[0564] t) SEQ ID NO:69 (CCR10_MOUSE_TRD) or SEQ ID NO:72 (CCR10_MOUSE_N term), preferably wherein at least one, two or all of Y14, Y17 and Y22 has been sulfated, or
[0565] u) SEQ ID NO:73 (CXCR1_HUMAN_TRD) or SEQ ID NO:76 (CXCR1_HUMAN_N term), preferably wherein Y27 has been sulfated, or
[0566] v) SEQ ID NO:74 (CXCR1_MACFA_TRD) or SEQ ID NO:77 (CXCR1_MACFA_N term), preferably wherein at least one of Y14 and Y28 has been sulfated, or
[0567] w) SEQ ID NO:75 (CXCR1_MOUSE_TRD) or SEQ ID NO:78 (CXCR1_MOUSE_N term), preferably wherein at least Y6 has been sulfated, or
[0568] x) SEQ ID NO:79 (CXCR2_HUMAN_TRD) or SEQ ID NO:82 (CXCR2_HUMAN_N term), preferably wherein Y23 and/or Y25 have been sulfated, or
[0569] y) SEQ ID NO:80 (CXCR2_MACFA_TRD) or SEQ ID NO:83 (CXCR2_MACFA_N term), preferably wherein Y20 and/or Y22 have been sulfated, or
[0570] z) SEQ ID NO:81 (CXCR2_MOUSE_TRD) or SEQ ID NO:84 (CXCR2_MOUSE_N term), preferably wherein Y24 has been sulfated, or
[0571] aa) SEQ ID NO:85 (CXCR3_HUMAN_TRD), SEQ ID NO:88 (CXCR3_HUMAN_N term), SEQ ID NO:86 (CXCR3_MACFA_TRD), SEQ ID NO:89 (CXCR3_MACFA_N term), SEQ ID NO:87 (CXCR3_MOUSE_TRD) or SEQ ID NO:90 (CXCR3_MOUSE_N term), preferably wherein at least one or both of Y27 and Y29 have been sulfated, or
[0572] bb) SEQ ID NO:91 (CXCR4_HUMAN_TRD), SEQ ID NO:94 (CXCR4_HUMAN_N term), SEQ ID NO:92 (CXCR4_MACFA_TRD) or SEQ ID NO:95 (CXCR4_MACFA_N term), preferably wherein at least Y12 and/or Y21 have been sulfated, or
[0573] cc) SEQ ID NO:93 (CXCR4_MOUSE_TRD) or SEQ ID NO:96 (CXCR4_MOUSE_N term), preferably wherein at least Y23 and/or Y14 have been sulfated, or
[0574] dd) SEQ ID NO:97 (CXCR5_HUMAN_TRD), SEQ ID NO:100 (CXCR5_HUMAN_N term), SEQ ID NO:98 (CXCR5_MACFA_TRD) or SEQ ID NO:101 (CXCR5_MACFA_N term), preferably wherein at least one of Y3 and Y27 have been sulfated, or
[0575] ee) SEQ ID NO:99 (CXCR5_MOUSE_TRD) or SEQ ID NO:102 (CXCR5_MOUSE_N term), preferably wherein at least Y3 and/or Y14 and/or Y20 and/or Y26 have been sulfated, or
[0576] ff) SEQ ID NO:103 (CXCR6_HUMAN_TRD) or SEQ ID NO:106 (CXCR6_HUMAN_N term), preferably wherein at least one or both of Y6 and Y10 has been sulfated, or
[0577] gg) SEQ ID NO:104 (CXCR6_MACFA_TRD) or SEQ ID NO:107 (CXCR6_MACFA_N term), preferably wherein at least two or all of Y4, Y7 and Y39 have been sulfated, or
[0578] hh) SEQ ID NO:105 (CXCR6_MOUSE_TRD) or SEQ ID NO:108 (CXCR6_MOUSE_N term), preferably wherein at least one or both of Y11 and Y15 have been sulfated, or
[0579] ii) SEQ ID NO:157 (CX3CR1_HUMAN_TRD) or SEQ ID NO:160 (CX3CR1_HUMAN_N term), preferably wherein at least Y14 has been sulfated, or
[0580] jj) SEQ ID NO:158 (CX3CR1_MACFA_TRD), preferably wherein at least Y20 has been sulfated, or
[0581] kk) SEQ ID NO:161 (CX3CR1_MACFA_N term), preferably wherein at least Y20 or Y22 has been sulfated, or
[0582] ll) SEQ ID NO:159 (CX3CR1_MOUSE_TRD) or SEQ ID NO:162 (CX3CR1_MOUSE_N term), preferably wherein at least Y15 has been sulfated, or
[0583] mm) SEQ ID NO:163 (CXCR1_HUMAN_TRD) or SEQ ID NO:166 (CXCR1_HUMAN_N term), preferably wherein at least Y27 has been sulfated, or
[0584] nn) SEQ ID NO:164 (CXCR1_MACMU_TRD), preferably wherein at least Y14 has been sulfated or
[0585] oo) SEQ ID NO:167 (CXCR1_MACMU_N term), preferably wherein at least Y14 or Y28 has been sulfated, or
[0586] pp) SEQ ID NO:165 (CXCR1_MOUSE_TRD) or SEQ ID NO:168 (CXCR1_MOUSE_N term), preferably wherein at least Y6 has been sulfated.

[0587] According to some embodiments A of the third embodiments of the 6^{th} aspect, the (first) isolated sulfated polypeptide comprises or consists of a sequence according to
[0588] a. SEQ ID NO:1 (CCR1_HUMAN_TRD), preferably wherein at least Y10 and/or Y18 have been sulfated, or
[0589] b. SEQ ID NO:7 (CCR2_HUMAN_TRD), preferably wherein at least Y26 has been sulfated, or
[0590] c. SEQ ID NO:13 (CCR3_HUMAN_TRD), preferably wherein Y16 and/or Y17 have been sulfated, or
[0591] d. SEQ ID NO:19 (CCR4_HUMAN_TRD), preferably wherein at least Y22 has been sulfated and preferably furthermore Y16, Y19 and/or Y20 have been sulfated, or
[0592] e. SEQ ID NO:25 (CCR5_HUMAN_TRD), preferably wherein two, three or all of Y3, Y10, Y14 and Y15 have been sulfated, or
[0593] f. SEQ ID NO:31 (CCR6_HUMAN_TRD), preferably wherein at least two or three of Y18, Y26 and Y27 have been sulfated, or
[0594] g. SEQ ID NO:37 (CCR7_HUMAN_TRD), preferably wherein one or both of Y8 and Y17 have been sulfated, or
[0595] h. SEQ ID NO:43 (CCR8_HUMAN_TRD), preferably wherein at least two or all of Y3, Y15 and Y17 have been sulfated, or
[0596] i. SEQ ID NO:61 (CCR9_HUMAN_TRD), preferably also Y17 and/or Y37 has been sulfated, or
[0597] j. SEQ ID NO:67 (CCR10_HUMAN_TRD), preferably wherein at least one or both of Y14 and Y22 has been sulfated, or
[0598] k. SEQ ID NO:73 (CXCR1_HUMAN_TRD), preferably wherein Y27 has been sulfated, or
[0599] l. SEQ ID NO:79 (CXCR2_HUMAN_TRD), preferably wherein Y23 and/or Y25 have been sulfated, or
[0600] m. SEQ ID NO:85 (CXCR3_HUMAN_TRD), preferably wherein at least one or both of Y27 and Y29 have been sulfated, or
[0601] n. SEQ ID NO:91 (CXCR4_HUMAN_TRD), preferably wherein at least Y12 and/or Y21 have been sulfated, or
[0602] o. SEQ ID NO:97 (CXCR5_HUMAN_TRD), preferably wherein at least one of Y3 and Y27 have been sulfated, or
[0603] p. SEQ ID NO:103 (CXCR6_HUMAN_TRD), preferably wherein at least one or both of Y6 and Y10 has been sulfated, or
[0604] q. SEQ ID NO:157 (CX3CR1_HUMAN_TRD), preferably wherein at least Y14 has been sulfated, or
[0605] r. SEQ ID NO:163 (CXCR1_HUMAN_TRD), preferably wherein at least Y27 has been sulfated.

[0606] According to some embodiments B of the third embodiments of the 6^{th} aspect, the (first) isolated sulfated polypeptide comprises or consists of a sequence according to
[0607] a) SEQ ID NO:3 (CCR1_MOUSE_TRD), preferably wherein at least Y10 and/or Y18 have been sulfated, or
[0608] b) SEQ ID NO:9 (CCR2_MOUSE_TRD), preferably wherein at least Y37 and/or Y39 has been sulfated, or
[0609] c) SEQ ID NO:15 (CCR3_MOUSE_TRD), preferably wherein Y20 and/or Y22 has been sulfated, or
[0610] d) SEQ ID NO:21 (CCR4_MOUSE_TRD), preferably wherein at least Y22 has been sulfated and preferably furthermore Y16, Y19 and/or Y20 have been sulfated, or
[0611] e) SEQ ID NO:27 (CCR5_MOUSE_TRD), preferably wherein two or three of Y10, Y12 and Y16 have been sulfated, or
[0612] f) SEQ ID NO:33 (CCR6_MOUSE_TRD), preferably wherein at least two or three of Y13, Y18 and Y19 have been sulfated,
[0613] g) SEQ ID NO:39 (CCR7_MOUSE_TRD), preferably wherein one or both of Y8 and Y17 and optionally Y20 have been sulfated have been sulfated, or
[0614] h) SEQ ID NO:45 (CCR8_MOUSE_TRD), preferably wherein at least two or all of Y3, Y14 and Y15 have been sulfated, or
[0615] i) SEQ ID NO:63 (CCR9_MOUSE_TRD), preferably wherein at least Y28 has been sulfated, and preferably also Y19 has been sulfated, or
[0616] j) SEQ ID NO:69 (CCR10_MOUSE_TRD), preferably wherein at least one, two or all of Y14, Y17 and Y22 has been sulfated, or
[0617] k) SEQ ID NO:75 (CXCR1_MOUSE_TRD), preferably wherein at least Y6 has been sulfated, or
[0618] l) SEQ ID NO:81 (CXCR2_MOUSE_TRD), preferably wherein Y24 has been sulfated, or
[0619] m) SEQ ID NO:87 (CXCR3_MOUSE_TRD), preferably wherein at least one or both of Y27 and Y29 have been sulfated, or
[0620] n) SEQ ID NO:93 (CXCR4_MOUSE_TRD), preferably wherein at least Y23 and/or Y14 have been sulfated, or
[0621] o) SEQ ID NO:99 (CXCR5_MOUSE_TRD), preferably wherein at least Y3 and/or Y14 and/or Y20 and/or Y26 have been sulfated, or
[0622] p) SEQ ID NO:105 (CXCR6_MOUSE_TRD), preferably wherein at least one or both of Y11 and Y15 have been sulfated, or
[0623] q) SEQ ID NO:159 (CX3CR1_MOUSE_TRD), preferably wherein at least Y15 has been sulfated, or
[0624] r) SEQ ID NO:165 (CXCR1_MOUSE_TRD), preferably wherein at least Y6 has been sulfated.

[0625] According to some embodiments C of the third embodiments of the 6^{th} aspect, the (first) isolated sulfated polypeptide comprises or consists of a sequence according to
[0626] a) SEQ ID NO:2 (CCR1_MACFA_TRD), preferably wherein at least Y10 and/or Y18 have been sulfated, or
[0627] b) SEQ ID NO:8 (CCR2_MACMU_TRD), preferably wherein at least Y26 has been sulfated, or
[0628] c) SEQ ID NO:14 (CCR3_MACFA_TRD), preferably wherein Y16 has been sulfated, or
[0629] d) SEQ ID NO:20 (CCR4_MACFA_TRD), preferably wherein at least Y22 has been sulfated and preferably furthermore Y16, Y19 and/or Y20 have been sulfated, or
[0630] e) SEQ ID NO:26 (CCR5_MACMU_TRD), preferably wherein two, three or all of Y3, Y10, Y14 and Y15 have been sulfated, or
[0631] f) SEQ ID NO:32 (CCR6_MACFA_TRD), preferably wherein at least two or three of Y23, Y31 and Y32 have been sulfated, or
[0632] g) SEQ ID NO:38 (CCR7_MACFA_TRD), preferably wherein one or both of Y8 and Y17 have been sulfated, or
[0633] h) SEQ ID NO:44 (CCR8_MACFA_TRD), preferably wherein at least two or all of Y3, Y15 and Y17 have been sulfated, or
[0634] i) SEQ ID NO:62 (CCR9_MACFA_TRD), preferably wherein at least Y28, and preferably also Y17 and/or Y37 has been sulfated, or
[0635] j) SEQ ID NO:68 (CCR10_MACFA_TRD), preferably wherein at least one or both of Y14 and Y22 has been sulfated, or
[0636] k) SEQ ID NO:74 (CXCR1_MACFA_TRD), preferably wherein at least one of Y14 and Y28 has been sulfated, or
[0637] l) SEQ ID NO:80 (CXCR2_MACFA_TRD), preferably wherein Y20 and/or Y22 have been sulfated, or
[0638] m) SEQ ID NO:86 (CXCR3_MACFA_TRD), preferably wherein at least one or both of Y27 and Y29 have been sulfated, or
[0639] n) SEQ ID NO:92 (CXCR4_MACFA_TRD), preferably wherein at least Y12 and/or Y21 have been sulfated, or
[0640] o) SEQ ID NO:98 (CXCR5_MACFA_TRD), preferably wherein at least one of Y3 and Y27 have been sulfated, or
[0641] p) SEQ ID NO:104 (CXCR6_MACFA_TRD), preferably wherein at least two or all of Y4, Y7 and Y39 have been sulfated, or
[0642] q) SEQ ID NO:158 (CX3CR1_MACFA_TRD), preferably wherein at least Y20 has been sulfated, or
[0643] r) SEQ ID NO:164 (CXCR1_MACMU_TRD), preferably wherein at least Y14 has been sulfated.

[0644] According to some fourth embodiments of the 6^{th} aspect, which may or may not be the same as the first, second and/or third embodiments of the 6^{th} aspect, the first isolated sulfated polypeptide comprises the N terminus of a seven transmembrane receptor including tyrosine rich domain (TRD) and preferably LID domain, and at least 25%, at least 50% or at least 75% of the tyrosine residues of the TRD are sulfated, preferably wherein at least one/the cysteine between the TRD and the LID domain has been removed or has been exchanged into a different amino acid.

[0645] According to some embodiments A of the fourth embodiments of the 6^{th} aspect, the (first) isolated sulfated polypeptide comprises or consists of a sequence according to
[0646] a) SEQ ID NO:4 (CCR1_HUMAN_N term), preferably wherein at least Y10 and/or Y18 have been sulfated,
[0647] b) SEQ ID NO:10 (CCR2_HUMAN_N term), preferably wherein at least Y26 has been sulfated,
[0648] c) SEQ ID NO:16 (CCR3_HUMAN_N term), preferably wherein Y16 and/or Y17 have been sulfated,
[0649] d) SEQ ID NO:22 (CCR4_HUMAN_N term), preferably wherein at least Y22 has been sulfated and preferably furthermore Y16, Y19 and/or Y20 have been sulfated,
[0650] e) SEQ ID NO:28 (CCR5_HUMAN_N term), preferably wherein two, three or all of Y3, Y10, Y14 and Y15 have been sulfated,
[0651] f) SEQ ID NO:34 (CCR6_HUMAN_N term), preferably wherein at least two or three of Y18, Y26 and Y27 have been sulfated,
[0652] g) SEQ ID NO:40 (CCR7_HUMAN_N term), preferably wherein one or both of Y8 and Y17 have been sulfated,
[0653] h) SEQ ID NO:46 (CCR8_HUMAN_N term with C=X or S), preferably wherein at least two or all of Y3, Y15 and Y17 have been sulfated,
[0654] i) SEQ ID NO:64 (CCR9_ HUMAN_N term), preferably wherein at least Y28, and preferably also Y17 and/or Y37 have been sulfated,
[0655] j) SEQ ID NO:70 (CCR10_HUMAN_N term), preferably wherein at least one or both of Y14 and Y22 have been sulfated,
[0656] k) SEQ ID NO:76 (CXCR1_HUMAN_N term), preferably wherein Y27 has been sulfated,
[0657] l) SEQ ID NO:82 (CXCR2_HUMAN_N term), preferably wherein Y23 and/or Y25 have been sulfated,
[0658] m) SEQ ID NO:88 (CXCR3_HUMAN_N term), preferably wherein at least one or both of Y27 and Y29 have been sulfated,
[0659] n) SEQ ID NO:94 (CXCR4_HUMAN_N term), preferably wherein at least Y12 and/or Y21 have been sulfated,
[0660] o) SEQ ID NO:100 (CXCR5_HUMAN_N term), preferably wherein at least one of Y3 and Y27 have been sulfated, or
[0661] p) SEQ ID NO:106 (CXCR6_HUMAN_N term), preferably wherein at least one or both of Y6 and Y10 have been sulfated,
[0662] q) SEQ ID NO:160 (CX3CR1_HUMAN_N term), preferably wherein at least Y14 has been sulfated, or
[0663] r) SEQ ID NO:166 (CXCR1_HUMAN_N term), preferably wherein at least Y27 has been sulfated.

[0664] According to some embodiments B of the fourth embodiments of the 6^{th} aspect, the (first) isolated sulfated polypeptide comprises or consists of a sequence according to
[0665] a) SEQ ID NO:6 (CCR1_MOUSE_N term), preferably wherein at least Y10 and/or Y18 have been sulfated, or
[0666] b) SEQ ID NO:12 (CCR2_MOUSE_N term), preferably wherein at least Y37 and/or Y39 has been sulfated, or
[0667] c) SEQ ID NO:18 (CCR3_MOUSE_N term), preferably wherein Y20 and/or Y22 has been sulfated, or
[0668] d) SEQ ID NO:24 (CCR4_MOUSE_N term), preferably wherein at least Y22 has been sulfated and preferably furthermore Y16, Y19 and/or Y20 have been sulfated, or
[0669] e) SEQ ID NO:30 (CCR5_MOUSE_N term), preferably wherein two or three of Y10, Y12 and Y16 have been sulfated, or
[0670] f) SEQ ID NO:36 (CCR6_MOUSE_N term), preferably wherein at least two or three of Y13, Y18 and Y19 have been sulfated,
[0671] g) SEQ ID NO:42 (CCR7_MOUSE_N term), preferably wherein one or both of Y8 and Y17 and optionally Y20 have been sulfated have been sulfated, or
[0672] h) SEQ ID NO:48 (CCR8_MOUSE_N term with C=X or S), preferably wherein at least two or all of Y3, Y14 and Y15 have been sulfated, or
[0673] i) SEQ ID NO:66 (CCR9_MOUSE_N term), preferably wherein at least Y28 has been sulfated, and preferably also Y19 has been sulfated, or
[0674] j) SEQ ID NO:72 (CCR10_MOUSE_N term), preferably wherein at least one, two or all of Y14, Y17 and Y22 has been sulfated, or
[0675] k) SEQ ID NO:78 (CXCR1_MOUSE_N term), preferably wherein at least Y6 has been sulfated, or
[0676] l) SEQ ID NO:84 (CXCR2_MOUSE_N term), preferably wherein Y24 has been sulfated, or
[0677] m) SEQ ID NO:90 (CXCR3_MOUSE_N term), preferably wherein at least one or both of Y27 and Y29 have been sulfated, or
[0678] n) SEQ ID NO:96 (CXCR4_MOUSE_N term), preferably wherein at least Y13 and/or Y14 have been sulfated, or
[0679] o) SEQ ID NO:102 (CXCR5_MOUSE_N term), preferably wherein at least Y3 and/or Y14 and/or Y20 and/or Y26 have been sulfated, or
[0680] p) SEQ ID NO:108 (CXCR6_MOUSE_N term), preferably wherein at least one or both of Y11 and Y15 have been sulfated, or
[0681] q) SEQ ID NO:162 (CX3CR1_MOUSE_N term), preferably wherein at least Y15 has been sulfated, or
[0682] r) SEQ ID NO:168 (CXCR1_MOUSE_N term), preferably wherein at least Y6 has been sulfated.

[0683] According to some embodiments C of the fourth embodiments of the 6^{th} aspect, the (first) isolated sulfated polypeptide comprises or consists of a sequence according to
[0684] a) SEQ ID NO:5 (CCR1_MACFA_N term), preferably wherein at least Y10 and/or Y18 have been sulfated, or
[0685] b) SEQ ID NO:11 (CCR2_MACMU_N term), preferably wherein at least Y26 has been sulfated, or
[0686] c) SEQ ID NO:17 (CCR3_MACFA_N term), preferably wherein Y16 has been sulfated, or
[0687] d) SEQ ID NO:23 (CCR4_MACFA_N term), preferably wherein at least Y22 has been sulfated and preferably furthermore Y16, Y19 and/or Y20 have been sulfated, or
[0688] e) SEQ ID NO:29 (CCR5_MACMU_N term), preferably wherein two, three or all of Y3, Y10, Y14 and Y15 have been sulfated, or
[0689] f) SEQ ID NO:35 (CCR6_MACFA_N term), preferably wherein at least two or three of Y23, Y31 and Y32 have been sulfated, or
[0690] g) SEQ ID NO:41 (CCR7_MACFA_N term), preferably wherein one or both of Y8 and Y17 have been sulfated, or
[0691] h) SEQ ID NO:47 (CCR8_MACFA_N term with C=X or S), preferably wherein at least two or all of Y3, Y15 and Y17 have been sulfated, or
[0692] i) SEQ ID NO:65 (CCR9_MACFA_N term), preferably wherein at least Y28, and preferably also Y17 and/or Y37 has been sulfated, or
[0693] j) SEQ ID NO:71 (CCR10_MACFA_N term), preferably wherein at least one or both of Y14 and Y22 has been sulfated, or
[0694] k) SEQ ID NO:77 (CXCR1_MACFA_N term), preferably wherein at least one of Y14 and Y28 has been sulfated, or
[0695] l) SEQ ID NO:83 (CXCR2_MACFA_N term), preferably wherein Y20 and/or Y22 have been sulfated, or
[0696] m) SEQ ID NO:89 (CXCR3_MACFA_N term), preferably wherein at least one or both of Y27 and Y29 have been sulfated, or
[0697] n) SEQ ID NO:95 (CXCR4_MACFA_N term), preferably wherein at least Y12 and/or Y21 have been sulfated, or
[0698] o) SEQ ID NO:101 (CXCR5_MACFA_N term), preferably wherein at least one of Y3 and Y27 have been sulfated, or
[0699] p) SEQ ID NO:107 (CXCR6_MACFA_N term), preferably wherein at least two or all of Y4, Y7 and Y39 have been sulfated, or
[0700] q) SEQ ID NO:161 (CX3CR1_MACFA_N term), preferably wherein at least Y20 or Y22 has been sulfated, or
[0701] r) SEQ ID NO:167 (CXCR1_MACMU_N term), preferably wherein at least Y14 or Y28 has been sulfated.

[0702] According to some fifth embodiments of the 6^{th} aspect, which may be or may not be the same as the first, second, third and/or fourth embodiments according to the 6^{th} aspect, the isolated antibody or antigen-binding fragment thereof, (specifically) binds to a second isolated sulfated polypeptide which comprises the tyrosine rich domain (TRD) of a seven transmembrane receptor.

[0703] Preferably the seven transmembrane receptor of the TRD comprised by the second isolated sulfated polypeptide
[0704] a) is different from the seven transmembrane receptor of the TRD comprised by the first isolated sulfated polypeptide, or is
[0705] b) the corresponding seven transmembrane receptor of the TRD comprised by the first isolated sulfated polypeptide but from a different species.

[0706] According to some preferred embodiments, the second isolated sulfated polypeptide which comprises the tyrosine rich domain (TRD) of a seven transmembrane receptor is different from the first isolated sulfated polypeptide which comprises the tyrosine rich domain (TRD) of a seven transmembrane receptor and is an isolated polypeptide with a sequence according to any of embodiments A, B, or C according to the third and/or fourth embodiments of the 6^{th} aspect. For example, the first isolated sulfated polypeptide may comprise the TRD of a seven transmembrane receptor of a first species and the second isolated sulfated polypeptide may comprise the TRD of a seven transmembrane receptor of a second species, preferably wherein the species are human and cynomolgus, or human and mouse, or human and rat.

[0707] According to some embodiments A of the fifth embodiments of the 6^{th} aspect, the antibody or fragment specifically binds to
[0708] a) a first isolated sulfated polypeptide comprising SEQ ID NO:1 (CCR1_HUMAN_TRD), preferably wherein at least Y10 and/or Y18 have been sulfated, and a second isolated sulfated polypeptide comprising SEQ ID NO:2 (CCR1_MACFA_TRD), preferably wherein at least Y10 and/or Y18 have been sulfated, or
[0709] b) a first isolated sulfated polypeptide comprising SEQ ID NO:7 (CCR2_HUMAN_TRD), preferably wherein at least Y26 has been sulfated, and a second isolated sulfated polypeptide comprising SEQ ID NO:8 (CCR2_MACMU_TRD), preferably wherein at least Y26 has been sulfated, or
[0710] c) a first isolated sulfated polypeptide comprising SEQ ID NO:13 (CCR3_HUMAN_TRD), preferably wherein Y16 and/or Y17 have been sulfated, and a second isolated sulfated polypeptide comprising SEQ ID NO:14 (CCR3_MACFA_TRD), preferably wherein Y16 has been sulfated, or
[0711] d) a first isolated sulfated polypeptide comprising SEQ ID NO:19 (CCR4_HUMAN_TRD), preferably wherein at least Y22 has been sulfated and preferably furthermore Y16, Y19 and/or Y20 have been sulfated, and a second isolated sulfated polypeptide comprising SEQ ID NO:20 (CCR4_MACFA_TRD), preferably wherein at least Y22 has been sulfated and preferably furthermore Y16, Y19 and/or Y20 have been sulfated, or
[0712] e) a first isolated sulfated polypeptide comprising SEQ ID NO:25 (CCR5_HUMAN_TRD), preferably wherein two, three or all of Y3, Y10, Y14 and Y15 have been sulfated, and a second isolated sulfated polypeptide comprising SEQ ID NO:26 (CCR5_MACMU_TRD), preferably wherein two, three or all of Y3, Y10, Y14 and Y15 have been sulfated, or
[0713] f) a first isolated sulfated polypeptide comprising SEQ ID NO:31 (CCR6_HUMAN_TRD), preferably wherein at least two or three of Y18, Y26 and Y27 have been sulfated, and a second isolated sulfated polypeptide comprising SEQ ID NO:32 (CCR6_MACFA_TRD), preferably wherein at least two or three of Y23, Y31 and Y32 have been sulfated, or
[0714] g) a first isolated sulfated polypeptide comprising SEQ ID NO:37 (CCR7_HUMAN_TRD), preferably wherein one or both of Y8 and Y17 have been sulfated, and a second isolated sulfated polypeptide comprising SEQ ID NO:38 (CCR7_MACFA_TRD), preferably wherein one or both of Y8 and Y17 have been sulfated, or
[0715] h) a first isolated sulfated polypeptide comprising SEQ ID NO:43 (CCR8_HUMAN_TRD), preferably wherein at least two or all of Y3, Y15 and Y17 have been sulfated, and a second isolated sulfated polypeptide comprising SEQ ID NO:44 (CCR8_MACFA_TRD), preferably wherein at least two or all of Y3, Y15 and Y17 have been sulfated, or
[0716] i) a first isolated sulfated polypeptide comprising SEQ ID NO:61 (CCR9_HUMAN_TRD), preferably also Y17 and/or Y37 has been sulfated, and a second isolated sulfated polypeptide comprising SEQ ID NO:62 (CCR9_MACFA_TRD), preferably wherein at least Y28, and preferably also Y17 and/or Y37 has been sulfated, or
[0717] j) a first isolated sulfated polypeptide comprising SEQ ID NO:67 (CCR10_HUMAN_TRD), preferably wherein at least one or both of Y14 and Y22 has been sulfated, and a second isolated sulfated polypeptide comprising SEQ ID NO:68 (CCR10_MACFA_TRD), preferably wherein at least one or both of Y14 and Y22 has been sulfated, or
[0718] k) a first isolated sulfated polypeptide comprising SEQ ID NO:73 (CXCR1_HUMAN_TRD), preferably wherein Y27 has been sulfated, and a second isolated sulfated polypeptide comprising SEQ ID NO:74 (CXCR1_MACFA_TRD), preferably wherein at least one of Y14 and Y28 has been sulfated, or
[0719] l) a first isolated sulfated polypeptide comprising SEQ ID NO:79 (CXCR2_HUMAN_TRD), preferably wherein Y23 and/or Y25 have been sulfated, and a second isolated sulfated polypeptide comprising SEQ ID NO:80 (CXCR2_MACFA_TRD), preferably wherein Y20 and/or Y22 have been sulfated, or
[0720] m) a first isolated sulfated polypeptide comprising SEQ ID NO:85 (CXCR3_HUMAN_TRD), preferably wherein at least one or both of Y27 and Y29 have been sulfated, and a second isolated sulfated polypeptide comprising SEQ ID NO:86 (CXCR3_MACFA_TRD), preferably wherein at least one or both of Y27 and Y29 have been sulfated, or
[0721] n) a first isolated sulfated polypeptide comprising SEQ ID NO:91 (CXCR4_HUMAN_TRD), preferably wherein at least Y12 and/or Y21 have been sulfated, and a second isolated sulfated polypeptide comprising SEQ ID NO:92 (CXCR4_MACFA_TRD), preferably wherein at least Y12 and/or Y21 have been sulfated, or
[0722] o) a first isolated sulfated polypeptide comprising SEQ ID NO:97 (CXCR5_HUMAN_TRD), preferably wherein at least one of Y3 and Y27 have been sulfated, and a second isolated sulfated polypeptide comprising SEQ ID NO:98 (CXCR5_MACFA_TRD), preferably wherein at least one of Y3 and Y27 have been sulfated, or
[0723] p) a first isolated sulfated polypeptide comprising SEQ ID NO:103 (CXCR6_HUMAN_TRD), preferably wherein at least one or both of Y6 and Y10 has been sulfated, and a second isolated sulfated polypeptide comprising SEQ ID NO:104 (CXCR6_MACFA_TRD), preferably wherein at least two or all of Y4, Y7 and Y39 have been sulfated
[0724] q) a first isolated sulfated polypeptide comprising SEQ ID NO:157 (CX3CR1_HUMAN_TRD), preferably wherein at least Y14 has been sulfated, and a second isolated sulfated polypeptide comprising SEQ ID NO:158 (CX3CR1_MACFA_TRD), preferably wherein at least Y20 has been sulfated, or
[0725] r) a first isolated sulfated polypeptide comprising SEQ ID NO:163 (CXCR1_HUMAN_TRD), preferably wherein at least Y27 has been sulfated, and a second isolated sulfated polypeptide comprising SEQ ID NO:164 (CXCR1_MACMU_TRD), preferably wherein at least Y14 has been sulfated.

[0726] According to some embodiments B of the fifth embodiments of the 6^{th} aspect, the antibody or fragment specifically binds to
[0727] a) a first isolated sulfated polypeptide comprising SEQ ID NO:4 (CCR1_HUMAN_N term), preferably wherein at least Y10 and/or Y18 have been sulfated, and a second isolated sulfated polypeptide comprising SEQ ID NO:5 (CCR1_MACFA_N term), preferably wherein at least Y10 and/or Y18 have been sulfated,
[0728] b) a first isolated sulfated polypeptide comprising SEQ ID NO:10 (CCR2_HUMAN_N term), preferably wherein at least Y26 has been sulfated, and a second isolated sulfated polypeptide comprising SEQ ID NO:11 (CCR2_MACMU_N term), preferably wherein at least Y26 has been sulfated,
[0729] c) a first isolated sulfated polypeptide comprising SEQ ID NO:16 (CCR3_HUMAN_N term), preferably wherein Y16 and/or Y17 have been sulfated, and a second isolated sulfated polypeptide comprising SEQ ID NO:17 (CCR3_MACFA_N term), preferably wherein Y16 has been sulfated,
[0730] d) a first isolated sulfated polypeptide comprising SEQ ID NO:22 (CCR4_HUMAN_N term), preferably wherein at least Y22 has been sulfated and preferably furthermore Y16, Y19 and/or Y20 have been sulfated, and a second isolated sulfated polypeptide comprising SEQ ID NO:23 (CCR4_MACFA_N term), preferably wherein at least Y22 has been sulfated and preferably furthermore Y16, Y19 and/or Y20 have been sulfated,
[0731] e) a first isolated sulfated polypeptide comprising SEQ ID NO:28 (CCR5_HUMAN_N term), preferably wherein two, three or all of Y3, Y10, Y14 and Y15 have been sulfated, and a second isolated sulfated polypeptide comprising SEQ ID NO:29 (CCR5_ MACMU_N term), preferably wherein two, three or all of Y3, Y10, Y14 and Y15 have been sulfated,
[0732] f) a first isolated sulfated polypeptide comprising SEQ ID NO:34 (CCR6_HUMAN_N term), preferably wherein at least two or three of Y18, Y26 and Y27 have been sulfated, and a second isolated sulfated polypeptide comprising SEQ ID NO:35 (CCR6_MACFA_N term), preferably wherein at least two or three of Y23, Y31 and Y32 have been sulfated,
[0733] g) a first isolated sulfated polypeptide comprising SEQ ID NO:40 (CCR7_HUMAN_N term), preferably wherein one or both of Y8 and Y17 have been sulfated, and a second isolated sulfated polypeptide comprising SEQ ID NO:41 (CCR7_MACFA_N term), preferably wherein one or both of Y8 and Y17 have been sulfated,
[0734] h) a first isolated sulfated polypeptide comprising SEQ ID NO:46 (CCR8_HUMAN_N term with C=X or S), preferably wherein at least two or all of Y3, Y15 and Y17 have been sulfated, and a second isolated sulfated polypeptide comprising SEQ ID NO:47 (CCR8_MACFA_N term with C=X or S), preferably wherein at least two or all of Y3, Y15 and Y17 have been sulfated,
[0735] i) a first isolated sulfated polypeptide comprising SEQ ID NO:64 (CCR9_ HUMAN_N term), preferably wherein at least Y28, and preferably also Y17 and/or Y37 have been sulfated, and a second isolated sulfated polypeptide comprising SEQ ID NO:65 (CCR9_MACFA_N term), preferably wherein at least Y28, and preferably also Y17 and/or Y37 has been sulfated,
[0736] j) a first isolated sulfated polypeptide comprising SEQ ID NO:70 (CCR10_HUMAN_N term), preferably wherein at least one or both of Y14 and Y22 have been sulfated, and a second isolated sulfated polypeptide comprising SEQ ID NO:71 (CCR10_MACFA_N term), preferably wherein at least one or both of Y14 and Y22 has been sulfated,
[0737] k) a first isolated sulfated polypeptide comprising SEQ ID NO:76 (CXCR1_HUMAN_N term), preferably wherein Y27 has been sulfated, and a second isolated sulfated polypeptide comprising SEQ ID NO:77 (CXCR1_MACFA_N term), preferably wherein at least one of Y14 and Y28 has been sulfated,
[0738] l) a first isolated sulfated polypeptide comprising SEQ ID NO:82 (CXCR2_HUMAN_N term), preferably wherein Y23 and/or Y25 have been sulfated, and a second isolated sulfated polypeptide comprising SEQ ID NO:83 (CXCR2_MACFA_N term), preferably wherein Y20 and/or Y22 have been sulfated,
[0739] m) a first isolated sulfated polypeptide comprising SEQ ID NO:88 (CXCR3_HUMAN_N term), preferably wherein at least one or both of Y27 and Y29 have been sulfated, and a second isolated sulfated polypeptide comprising SEQ ID NO:89 (CXCR3_MACFA_N term), preferably wherein at least one or both of Y27 and Y29 have been sulfated,
[0740] n) a first isolated sulfated polypeptide comprising SEQ ID NO:94 (CXCR4_HUMAN_N term), preferably wherein at least Y12 and/or Y21 have been sulfated, and a second isolated sulfated polypeptide comprising SEQ ID NO:95 (CXCR4_MACFA_N term), preferably wherein at least Y12 and/or Y21 have been sulfated,
[0741] o) a first isolated sulfated polypeptide comprising SEQ ID NO:100 (CXCR5_HUMAN_N term), preferably wherein at least one of Y3 and Y27 have been sulfated, and a second isolated sulfated polypeptide comprising SEQ ID NO:101 (CXCR5_MACFA_N term), preferably wherein at least one of Y3 and Y27 have been sulfated, or
[0742] p) a first isolated sulfated polypeptide comprising SEQ ID NO:106 (CXCR6_HUMAN_N term), preferably wherein at least one or both of Y6 and Y10 have been sulfated, and a second isolated sulfated polypeptide comprising SEQ ID NO:107 (CXCR6_MACFA_N term), preferably wherein at least two or all of Y4, Y7 and Y39 have been sulfated, or
[0743] q) a first isolated sulfated polypeptide comprising SEQ ID NO:160 (CX3CR1_HUMAN_N term), preferably wherein at least Y14 has been sulfated, and a second isolated sulfated polypeptide comprising SEQ ID NO:161 (CX3CR1_MACFA_N term), preferably wherein at least Y20 or Y22 has been sulfated, or
[0744] r) a first isolated sulfated polypeptide comprising SEQ ID NO:166 (CXCR1_HUMAN_N term), preferably wherein at least Y27 has been sulfated, and a second isolated sulfated polypeptide comprising SEQ ID NO:167 (CXCR1_MACMU_N term), preferably wherein at least Y14 or Y28 has been sulfated.

[0745] According to some embodiments C1 of the fifth embodiments of the 6^{th} aspect, the antibody or fragment specifically binds to a first isolated sulfated polypeptide comprising a sequence according to some embodiments A of the third embodiments of the 6^{th} aspect and binds to a second isolated sulfated polypeptide comprising a sequence according to some embodiments B or C of the third embodiments of the 6^{th} aspect, wherein preferably the first and the second polypeptide comprise the TRD of the same receptor but from different species.

[0746] According to some embodiments C2 of the fifth embodiments of the 6^{th} aspect, the antibody or fragment specifically binds to a first isolated sulfated polypeptide comprising a sequence according to some embodiments A of the fourth embodiments of the 6^{th} aspect and binds to a second isolated sulfated polypeptide comprising a sequence according to some embodiments B or C of the fourth embodiments of the 6^{th} aspect, wherein preferably the first and the second polypeptide comprise the TRD of the same receptor but from different species.

[0747] According to some sixth embodiments of the 6^{th} aspect, which may be or may not be the same as the first, second, third, fourth and/or fifth embodiments according to the 6^{th} aspect, the dissociation constant or the EC50 of the antibody or antigen-binding fragment for binding the first isolated sulfated polypeptide and/or for binding said seven transmembrane receptor is below 200 nM, 150 nM, 100 nM, 10 nM, 5 nM, 2.5 nM, 1 nM, 0.5 nM or 0.25 nM.

[0748] According to some embodiments A of the sixth embodiments of the 6^{th} aspect, the dissociation constant or the EC50 of the antibody or antigen-binding fragment for binding the first isolated sulfated polypeptide and/or for binding said seven transmembrane receptor is below 200 nM, 199 nM, 198 nM, 197 nM, 196 nM, 195 nM, 194 nM, 193 nM, 192 nM, 191 nM, 190 nM, 189 nM, 188 nM, 187 nM, 186 nM, 185 nM, 184 nM, 183 nM, 182 nM, 181 nM, 180 nM, 179 nM, 178 nM, 177 nM, 176 nM, 175 nM, 174 nM, 173 nM, 172 nM, 171 nM, 170 nM, 169 nM, 168 nM, 167 nM, 166 nM, 165 nM, 164 nM, 163 nM, 162 nM, 161 nM, 160 nM, 159 nM, 158 nM, 157 nM, 156 nM, 155 nM, 154 nM, 153 nM, 152 nM, 151 nM, 150 nM, 149 nM, 148 nM, 147 nM, 146 nM, 145 nM, 144 nM, 143 nM, 142 nM, 141 nM, 140 nM, 139 nM, 138 nM, 137 nM, 136 nM, 135 nM, 134 nM, 133 nM, 132 nM, 131 nM, 130 nM, 129 nM, 128 nM, 127 nM, 126 nM, 125 nM, 124 nM, 123 nM, 122 nM, 121 nM, 120 nM, 119 nM, 118 nM, 117 nM, 116 nM, 115 nM, 114 nM, 113 nM, 112 nM, 111 nM, 110 nM, 109 nM, 108 nM, 107 nM, 106 nM, 105 nM, 104 nM, 103 nM, 102 nM, 101 nM, 100 nM, 99 nM, 98 nM, 97 nM, 96 nM, 95 nM, 94 nM, 93 nM, 92 nM, 91 nM, 90 nM, 89 nM, 88 nM, 87 nM, 86 nM, 85 nM, 84 nM, 83 nM, 82 nM, 81 nM, 80 nM, 79 nM, 78 nM, 77 nM, 76 nM, 75 nM, 74 nM, 73 nM, 72 nM, 71 nM, 70 nM, 69 nM, 68 nM, 67 nM, 66 nM, 65 nM, 64 nM, 63 nM, 62 nM, 61 nM, 60 nM, 59 nM, 58 nM, 57 nM, 56 nM, 55 nM, 54 nM, 53 nM, 52 nM, 51 nM, 50 nM, 49 nM, 48 nM, 47 nM, 46 nM, 45 nM, 44 nM, 43 nM, 42 nM, 41 nM, 40 nM, 39 nM, 38 nM, 37 nM, 36 nM, 35 nM, 34 nM, 33 nM, 32 nM, 31 nM, 30 nM, 29 nM, 28 nM, 27 nM, 26 nM, 25 nM, 24 nM, 23 nM, 22 nM, 21 nM, 20 nM, 19 nM, 18 nM, 17 nM, 16 nM, 15 nM, 14 nM, 13 nM, 12 nM, 11 nM, 10 nM, 9 nM, 8 nM, 7 nM, 6 nM, 5 nM, 4 nM, 3 nM, 2 nM, 1 nM, 0.9 nM, 0.8 nM, 0.7 nM, 0.6 nM, 0.5 nM, 0.4 nM, 0.3 nM, 0.25 nM, 0.2 nM, 0.15 nM, or 0.1 nM.

[0749] Preferably, the dissociation constant or the EC50 of the antibody or antigen-binding fragment for binding the first isolated sulfated polypeptide and/or for said seven transmembrane receptor is below 10 nM, 5 nM, 2.5 nM, 1 nM, 0.5 nM, 0.25 nM, 0.2 nM, 0.15 nM, or 0.1 nM.

[0750] Preferably, EC50 can be determined in CHO cells overexpressing the target. As disclosed for instance in example 10.1.1, the antibodies obtained with a method disclosed herein have excellent affinities for their respective target. For example, TPP-21181, TPP-17578, TPP-19546, TPP-18206, TPP-21360 and TPP-23411 bound human CCR8 with an EC50 of 4.8 nM, 1.7 nM, 0.8 nM, 0.6 nM, ˜0.9 nM or 1.7 nM in CHO cells engineered to overexpress CCR8. Also, TPP-21181, TPP-17578, TPP-19546, TPP-18206, TPP-21360 and TPP-23411 bound cynomolgus CCR8 with an EC50 of 1.8 nM, 1 nM, 0.5 nM, 0.7 nM, ˜0.55 nM or 0.9 nM. In addition, TPP-17578, TPP-19546, TPP-18206, and TPP-21360 bound to human regulatory T cells with an EC50 of 25 nM, 15 nM, 23 nM or 10 nM. In addition, anti-murine CCR8 antibody TPP-14099 binds CHO cells expressing murine CCR8 with an EC50 of 3 nM and murine iTregs with an EC50 of 13.2 nM, cf. Table 10.1.1.5.

[0751] According to some embodiments B of the sixth embodiments of the 6^{th} aspect, which may or may not be the same as the embodiments A of the sixth embodiments of the 6^{th} aspect, the dissociation constant or the EC50 of the antibody or antigen-binding fragment for binding the second isolated sulfated polypeptide and/or for binding the second seven transmembrane receptor is below 200 nM, 199 nM, 198 nM, 197 nM, 196 nM, 195 nM, 194 nM, 193 nM, 192 nM, 191 nM, 190 nM, 189 nM, 188 nM, 187 nM, 186 nM, 185 nM, 184 nM, 183 nM, 182 nM, 181 nM, 180 nM, 179 nM, 178 nM, 177 nM, 176 nM, 175 nM, 174 nM, 173 nM, 172 nM, 171 nM, 170 nM, 169 nM, 168 nM, 167 nM, 166 nM, 165 nM, 164 nM, 163 nM, 162 nM, 161 nM, 160 nM, 159 nM, 158 nM, 157 nM, 156 nM, 155 nM, 154 nM, 153 nM, 152 nM, 151 nM, 150 nM, 149 nM, 148 nM, 147 nM, 146 nM, 145 nM, 144 nM, 143 nM, 142 nM, 141 nM, 140 nM, 139 nM, 138 nM, 137 nM, 136 nM, 135 nM, 134 nM, 133 nM, 132 nM, 131 nM, 130 nM, 129 nM, 128 nM, 127 nM, 126 nM, 125 nM, 124 nM, 123 nM, 122 nM, 121 nM, 120 nM, 119 nM, 118 nM, 117 nM, 116 nM, 115 nM, 114 nM, 113 nM, 112 nM, 111 nM, 110 nM, 109 nM, 108 nM, 107 nM, 106 nM, 105 nM, 104 nM, 103 nM, 102 nM, 101 nM, 100 nM, 99 nM, 98 nM, 97 nM, 96 nM, 95 nM, 94 nM, 93 nM, 92 nM, 91 nM, 90 nM, 89 nM, 88 nM, 87 nM, 86 nM, 85 nM, 84 nM, 83 nM, 82 nM, 81 nM, 80 nM, 79 nM, 78 nM, 77 nM, 76 nM, 75 nM, 74 nM, 73 nM, 72 nM, 71 nM, 70 nM, 69 nM, 68 nM, 67 nM, 66 nM, 65 nM, 64 nM, 63 nM, 62 nM, 61 nM, 60 nM, 59 nM, 58 nM, 57 nM, 56 nM, 55 nM, 54 nM, 53 nM, 52 nM, 51 nM, 50 nM, 49 nM, 48 nM, 47 nM, 46 nM, 45 nM, 44 nM, 43 nM, 42 nM, 41 nM, 40 nM, 39 nM, 38 nM, 37 nM, 36 nM, 35 nM, 34 nM, 33 nM, 32 nM, 31 nM, 30 nM, 29 nM, 28 nM, 27 nM, 26 nM, 25 nM, 24 nM, 23 nM, 22 nM, 21 nM, 20 nM, 19 nM, 18 nM, 17 nM, 16 nM, 15 nM, 14 nM, 13 nM, 12 nM, 11 nM, 10 nM, 9 nM, 8 nM, 7 nM, 6 nM, 5 nM, 4 nM, 3 nM, 2 nM, 1 nM, 0.9 nM, 0.8 nM, 0.7 nM, 0.6 nM, 0.5 nM, 0.4 nM, 0.3 nM, 0.25 nM, 0.2 nM, 0.15 nM, or 0.1 nM.

[0752] Preferably, the dissociation constant (KD) or the EC50 of the antibody or antigen-binding fragment for binding the second isolated sulfated polypeptide and/or for binding the second seven transmembrane receptor is below 10 nM, 5 nM, 2.5 nM, 1 nM, 0.5 or 0.25 nM.

[0753] According to some embodiments AB of the sixth embodiments of the 6^{th} aspect, the dissociation constant (KD) or the EC50 of the antibody or antigen-binding fragment for binding the first isolated sulfated polypeptide and/or the first seven transmembrane receptor is below 10 nM, 5 nM, 2.5 nM, 1 nM, 0.5 nM or 0.25 nM and the dissociation constant (KD) or the EC50 of the antibody or antigen-binding fragment for binding the second isolated sulfated polypeptide and/or the second seven transmembrane receptor is below 10 nM, 5 nM, 2.5 nM, 1 nM, 0.5 nM or 0.25 nM.

[0754] According to some seventh embodiments of the 6^{th} aspect, which may be or may not be the same as the first, second, third, fourth, fifth and/or sixth embodiments according to the 6^{th} aspect, the dissociation constant (KD) of the antibody for binding the first isolated sulfated polypeptide is lower than the dissociation constant (KD) of the antibody for binding a first isolated non-sulfated polypeptide having the same sequence as the first isolated sulfated polypeptide. Preferably, the antibody does not substantially bind a first isolated non-sulfated polypeptide having the same sequence as the first isolated sulfated polypeptide.

[0755] According to some embodiments A of the seventh embodiments of the 6^{th} aspect, the dissociation constant or the EC50 of the antibody for binding the first isolated non-sulfated polypeptide is higher than 100 nM, 150 nM, 200 nM, 250 nM, 300 nM, 350 nM, 400 nM, 450 nM, 500 nM, 600 nM, 700 nM, 800 nM, 900 nM, 1 μM, 1.25 μM, 1.5 μM, 1.75 μM, 2 μM, 2.25 μM, 2.5 μM, 2.75 μM, or 3 μM, or is not detectable. Preferably, the dissociation constant or the EC50 of the antibody for binding the first isolated non-sulfated polypeptide is higher than 100 nM, 250 nM, 500 nM, 1 μM, 2 μM or 3 μM, or is not detectable.

[0756] According to some embodiments B of the seventh embodiments of the 6^{th} aspect, which may be the same as the embodiments A of the seventh embodiments of the 6^{th} aspect, the dissociation constant or the EC50 of the antibody or fragment for binding the first isolated sulfated polypeptide is below 10 nM, 5 nM, 2.5 nM, 1 nM, 0.5 nM or 0.25 nM, and the dissociation constant or the EC50 of the antibody or fragment for binding the first isolated non-sulfated polypeptide is higher than 10 nM, 25 nM, 50 nM, 100 nM, 250 nM or 500 nM, or is not detectable.

[0757] The antibody according to the 6^{th} aspect may comprise CDRs derived from human, monkey, Macaca fascicularis (cynomolgus monkey), Macaca mulatta (rhesus macaque), rodent, mouse, rat, horse, bovine, pig, dog, cat and camel. Preferably, the antibody according to the 6^{th} aspect comprises human, rat or mouse derived CDRs.

[0758] According to some 8^{th} embodiments of the 6^{th} aspect, which may be and are suggested to be combined with the first, second, third, fourth, fifth, sixth and/or seventh embodiments of the sixth aspect, the isolated antibody or antigen-binding fragment comprises human derived CDRs. According to some highly preferred embodiments, the human derived CDRs comprise no deviations or less than 1, 2, 3, 4, 5, 6, 7, 8, 9, 10, 11, 12, 13, 14 or 15 deviations from the closest human germline. The closest human germline may be determined as known in the art, e.g. in silico using IgBLAST (Ye, Jian, et al. “IgBLAST: an immunoglobulin variable domain sequence analysis tool.” Nucleic acids research 41.W1 (2013): W34-W40) with data retrieved from the IMGT human germline database. The antibodies according to these 8^{th} embodiments can be obtained as described e.g. in example 6 or 8, or as described elsewhere herein.

[0759] According to some 9^{th} embodiments of the 6^{th} aspect, which may be and are suggested to be combined with the first, second, third, fourth, fifth, sixth, seventh, or 8^{th} embodiments of the 6^{th} aspect, the isolated antibody or antigen-binding fragment is cross reactive for human and cynomolgus, cf. example 10.1.1. Preferably, the dissociation constant (KD) or the EC50 of the antibody or antigen-binding fragment for binding a human chemokine receptor is below 200 nM, 150 nM, 100 nM, 10 nM, 5 nM, 2.5 nM, 1 nM, 0.5 or 0.25 nM, such as below 10 nM, 5 nM, 2.5 nM, 1 nM, 0.5 or 0.25 nM. Preferably, the dissociation constant (KD) or the EC50 of the antibody or antigen-binding fragment for binding a cynomolgus chemokine receptor is below 10 nM, 5 nM, 2.5 nM, 1 nM, 0.5 or 0.25 nM.

[0760] According to some 10^{th} embodiments of the 6^{th} aspect, which may be and are suggested to be combined with the first, second, third, fourth, fifth, sixth, seventh, 8^{th}, and/or 9^{th} embodiments of the 6^{th} aspect, the isolated antibody or antigen-binding fragment is characterized by a HCDR3 region deviating in composition from average HCDR3 regions. Preferably the isolated antibody or antigen-binding fragment is characterized by a HCDR3 region comprising between 10 and 34% of tyrosine and/or at least one histidine, preferably between 2 and 20% of histidine, most preferably between 7 and 20% of histidine.

[0761] In some embodiments A of the 10^{th} embodiments of the 6^{th} aspect, the isolated antibody or antigen-binding fragment comprises a HCDR3 having
[0762] a)>0 and <35%, >8 and <34%, ≥10 and ≤34%, or >15 and <31% tyrosine (Y) residues, and/or
[0763] b)>0 and ≤16%, ≥2 and ≤20% or ≥7 and ≤20% histidine (H) residues, and
[0764] c) preferably >0 and ≤18%, ≥7 and ≤10% or ≥0 and ≤7% arginine (R) residues, and/or
[0765] d) preferably >0 and ≤25%, ≥7 and ≤16% or ≥7 and ≤13% aspartic acid (D) residues, and/or
[0766] e) preferably no lysine (K) residues, and/or
[0767] f) preferably no glutamic acid (E) residues.

[0768] In some embodiments B of the 10^{th} embodiments of the 6^{th} aspect, which may be the same as or different from the embodiments A, the isolated antibody or antigen-binding fragment comprises a HCDR3 having
[0769] a)>0 and <47%, >22 and <50%, >10 and <34%, or >15 and <47% charged amino acids, and/or
[0770] b)>0 and <32%, >8 and <30%, or >10 and <37% positively charged amino acids, and/or
[0771] c)>0 and <26%, ≥7 and <16%, or >7 and <14% negatively charged amino acids.

[0772] In some embodiments C of the 10^{th} embodiments of the 6^{th} aspect, which may be the same as or different from embodiments A and/or B, the isolated antibody or antigen-binding fragment comprises a HCDR3 having >0 and ≤42%, ≥10 and ≤42% or ≥36 and ≤43% histidine and tyrosine residues in total.

[0773] Each of the embodiments and descriptions disclosed for CCR8 according to aspect 10 is disclosed herein for chemokine receptor antibodies in general, e.g. with the necessary changes. The inventors believe that the sulfated TRD motif rather than the specific CCR8 sequence promotes the increased frequencies for tyrosine and/or histidine.

[0774] According to some 11^{th} embodiments of the 6^{th} aspect, which may be and are suggested to be combined with the first, second, third, fourth, fifth, sixth, seventh, eighth, ninth, and/or 10^{th} embodiments of the 6^{th} aspect, the isolated antibody or antigen-binding fragment at least partially modulates CCR8 signaling.

[0775] For example, an antibody according to the current invention can
[0776] a) block G-protein independent signaling, and/or
[0777] b) block G-protein dependent signaling, and/or
[0778] c) block G-protein dependent and G-protein independent signaling, and/or
[0779] d) increase G-protein independent signaling, and/or
[0780] e) increase G-protein dependent signaling, and/or
[0781] f) increase G-protein dependent and G-protein independent signaling.

[0782] In the particular context, modulation refers to blocking of ligand induced G-protein independent signaling and induction of G-protein independent signaling.

[0783] According to some preferred embodiments, the antibody or fragment does not modulate G protein independent signaling of the seven transmembrane receptor. According to some preferred embodiments, the antibody or fragment does not block ligand induced G-protein independent signaling of the target protein. According to some preferred embodiments, the antibody or fragment does not induce G-protein independent signaling.

[0784] According to some preferred embodiments, the antibody or fragment blocks G protein dependent signaling. G protein dependent signaling can be analyzed by chemotaxis assay or preferably by calcium flux assay, as described elsewhere herein.

[0785] According to some preferred embodiments, the antibody or fragment blocks G protein dependent signaling of the chemokine receptor but does not block G protein independent signaling of the chemokine receptor, cf. example 10.4. G protein independent signaling of the chemokine receptor is any signaling activity which is not G protein dependent signaling.

[0786] According to some 12^{th} embodiments of the 6^{th} aspect, which may be and are suggested to be combined with the first, second, third, fourth, fifth, sixth, seventh, 8^{th}, 9^{th}, 10^{th} and 11^{th} embodiments of the 6^{th} aspect, the isolated antibody or antigen-binding fragment is a low internalizing or non-internalizing antibody or antigen binding fragment.

[0787] Because overexpression may impact the internalization behavior and is less suited to model internalization in a therapeutic setting, internalization is preferably determined using a model cell line with endogenous expression of the target chemokine receptor, cf. example 10.5. For example, internalization can be determined over a time frame or for specific time points. Preferably internalization can be determined after 15 min, 30 min, 1 h, 2 h, 3 h, 6 h, 12 h, 24 h or 48 h in a cell endogenously expressing the target.

[0788] According to some embodiments A of the 12^{th} embodiments of the 6^{th} aspect, the antibody or antigen-binding fragment has an internalization rate in the same order of magnitude as the internalization rate of the isotype control.

[0789] According to some embodiments B of the 12^{th} embodiments of the 6^{th} aspect, the antibody or antigen-binding fragment is characterized by an internalization into a cell with endogenous target expression which is lower than the 1.5, 2, 3, 4, 5, 6, 7, or 10-fold of the internalization of the isotype control. The isotype control for an antibody can be selected as known in the art to match the isotype of the antibody as closely as possible, but without binding to the target.

[0790] According to some embodiments C of the 12^{th} embodiments of the 6^{th} aspect, the antibody or antigen-binding fragment is characterized by an internalization into a cell with endogenous target expression which is lower than 150%, 175%, 200%, 300%, 400% or 500% of the internalization of the isotype control e.g. after 15 min, 30 min, 1 h, 2 h, 3 h, 6 h, 12 h, 24 h or 48 h.

[0791] According to some 13^{th} embodiments of the 6^{th} aspect, which may be and are suggested to be combined with the first, second, third, fourth, fifth, sixth, seventh, 8^{th}, 9^{th}, 10^{th}, 11^{th} and/or 12^{th} embodiments of the aspect, the isolated antibody or antigen-binding fragment induces ADCC and/or ADCP of cells expressing the target receptor of the antibody.

[0792] In some preferred embodiments of the 13^{th} embodiments of the 6^{th} aspect, the antibody or antigen-binding fragment is afucosylated.

[0793] In some embodiments A1 of the 13^{th} embodiments of the 6^{th} aspect, the antibody or antigen-binding fragment binds to human Fc gamma receptor IIIA variant V176 (CD16a) with a dissociation constant (KD) lower than 530 nM, 500 nM, 450 nM, 400 nM, 300 nM or 200 nM. Preferably, the KD can be determined using surface plasmon resonance.

[0794] In some embodiments B1 of the 13^{th} embodiments of the 6^{th} aspect, which may be the same as or different from the embodiments A1, the antibody or antigen-binding fragment induces antibody-dependent cell-mediated cytotoxicity (ADCC) in target cells expressing the target receptor via human effector cells, such as human NK cells. ADCC induction can be analyzed with an assay known in the art, for example as described according to examples 10.3.3 ff. or elsewhere herein. Preferably the assay is performed with Treg cells wherein at least 80% or 85% of the Treg cells express CCR8.

[0795] In some embodiments C1 of the 13^{th} embodiments of the 6^{th} aspect, which may be the same as or different from the embodiments A1 or B1, the ADCC-induced maximal depletion of cells expressing the target receptor is at least 30%, 35%, 40%, 45%, 50%, 55%, 60%, 70%, 80%, 90%, 95%, 98% or 99%.

[0796] In some embodiments D1 of the 13^{th} embodiments of the 6^{th} aspect, which may be the same as or different from the embodiments A1, B1 or C1, the EC50 for ADCC-induced depletion of target expressing cells is below 500 pM, 400 pM, 300 pM, 200 pM, 100 pM, 50 pM, 25 pM, 20 pM, 12.5 pM, 10 pM, 5 pM or 2.5 pM.

[0797] In some embodiments A2 of the 13^{th} embodiments of the 6^{th} aspect, which may or may not be the same as the embodiments A1, B1, C1 and/or D1, the antibody or antigen-binding fragment binds to human Fc gamma RIIA (CD32a) with a dissociation constant (KD) lower than 30 μM, 20 μM, 10 μM, 5 μM or 1 μM.

[0798] In some embodiments B2 of the 13^{th} embodiments of the 6^{th} aspect, which may be the same as the embodiments A1, B1, C1 and/or D1, and which may be the same as the embodiments A2, the antibody or antigen-binding fragment induces antibody-dependent cell-mediated phagocytosis (ADCP) in cells expressing the target receptor via human effector cells, such as human macrophages. For example, the human macrophages can be M2 or M1 macrophages.

[0799] In some embodiments C2 of the 13^{th} embodiments of the 6^{th} aspect, which may be the same as the embodiments A1, B1, C1 and/or D1, and which may be the same as the embodiments A2 and/or B2, the ADCP-induced maximal depletion of cells expressing the target receptor is at least 5, 10, 15, 20, 25, 30, 40 or 50%.

[0800] In some embodiments D2 of the 13^{th} embodiments of the 6^{th} aspect, which may be the same as the embodiments A1, B1, C1 and/or D1, and which may be the same as the embodiments A2, B2, and/or C2, the EC50 for ADCP-induced depletion of activated human regulatory T cells is below 1500 pM, 1000 pM, 500 pM, 250 pM, 200 pM, 150 pM, 100 pM, 75 pM, 50 pM, 25 pM or 10 pM.

[0801] In some preferred of the 13^{th} embodiments of the 6^{th} aspect, there is provided an isolated antibody or antigen-binding fragment thereof, specifically binding to a chemokine receptor, wherein the antibody or antigen-binding fragment
[0802] a) binds to human Fc gamma receptor IIIA variant V176 (CD16a) with a dissociation constant (KD) lower than 530 nM, 500 nM, 450 nM, 400 nM, 300 nM or 200 nM, and/or
[0803] b) binds to human Fc gamma RITA (CD32a) with a dissociation constant (KD) lower than 30 μM, 20 μM, 10 μM, 5 μM or 1 μM.

[0804] In some preferred of the 13^{th} embodiments of the 6^{th} aspect, there is provided an isolated antibody or antigen-binding fragment thereof, specifically binding to a chemokine receptor, wherein the antibody or antigen-binding fragment
[0805] a) induces antibody-dependent cell-mediated cytotoxicity (ADCC) in target cells expressing the human chemokine receptor via human effector cells, such as human NK cells, and/or
[0806] b) induces antibody-dependent cell-mediated phagocytosis (ADCP) in target cells expressing the human chemokine receptor via human effector cells, such as human macrophages.

[0807] In some preferred of the 13^{th} embodiments of the 6^{th} aspect, there is provided an isolated antibody or antigen-binding fragment thereof, specifically binding to a chemokine receptor, wherein
[0808] a) the ADCC-induced maximal depletion in target cells expressing the human chemokine receptor is at least 25%, 30%, 35%, 40%, 45%, 50%, 55%, 60%, 70%, 80%, 90%, 95%, 98% or 99%, and/or
[0809] b) the ADCP-induced maximal depletion in target cells expressing the human chemokine receptor is at least 5%, 10%, 15%, 20%, 25%, 30%, 40% or 50%, and/or
[0810] c) the maximal depletion of target cells expressing the human chemokine receptor, is at least 30%, 35%, 40%, 45%, 50%, 55%, 60%, 70%, 80%, 90%, 95% or 99%.

[0811] In some preferred of the 13^{th} embodiments of the 6^{th} aspect, there is provided an isolated antibody or antigen-binding fragment thereof, specifically binding to a chemokine receptor, wherein
[0812] a) the EC50 for ADCC-induced depletion of target cells expressing the human chemokine receptor is below 200 pM, 100 pM, 50 pM, 25 pM, 12.5 pM, 10 pM or 5 pM and/or
[0813] b) the EC50 for ADCP-induced depletion of target cells expressing the human chemokine receptor is below 500 pM, 250 pM, 200 pM, 150 pM, 100 pM, 75 pM, 50 pM or 25 pM.

[0814] According to some 14^{th} embodiments of the 6^{th} aspect, which may be and are suggested to be combined with the first, second, third, fourth, fifth, sixth, seventh, 8^{th}, 9^{th}, 10^{th}, 11^{th}, 12^{th} and/or 13^{th} embodiments of the 6^{th} aspect, the isolated antibody or antigen-binding fragment comprises a human, rat or murine IgG antibody, preferably a human IgG1 antibody or a murine IgG2a antibody, cf. example 6 and 8.

[0815] According to some 15^{th} embodiments of the 6^{th} aspect, which may be and are suggested to be combined with the first, second, third, fourth, fifth, sixth, seventh, 8^{th}, 9^{th}, 10^{th}, 11^{th}, 12^{th}, 13^{th} and/or 14^{th} embodiments of the 6^{th} aspect, the isolated antibody or antigen-binding fragment is an scFv, Fab, Fab′ or a F(ab′)2 fragment, cf. example 6.

[0816] The antibodies according to the current aspect can be conjugated, e.g. as discussed elsewhere herein. The antibodies according to the current aspect can be used in the treatment of a tumor or a disease characterized by the involvement of cells expressing the seven transmembrane receptor, e.g. as discussed elsewhere herein. The antibodies according to the current aspect can be used as a diagnostic agent in vivo or in vitro, e.g. as discussed elsewhere herein. Furthermore, there is provided a kit comprising an antibody according to the current aspect with instructions for use.

### Preferred Combinations According to the 6^{th} Aspect

[0817] The following embodiments disclose preferred combinations of the sixth aspect, thereby emphasizing the modular nature of the invention. Provided according to a preferred embodiment I is an isolated antibody or antigen-binding fragment thereof, specifically binding to a first isolated sulfated polypeptide which comprises the tyrosine rich domain (TRD) of a seven transmembrane receptor, and optionally its LID domain, wherein at least 25%, at least 50% or at least 75% of the tyrosine residues of the TRD are sulfated. Provided according to a preferred embodiment II is the isolated antibody or antigen-binding fragment according to preferred embodiment I, wherein the cysteine between the TRD and the LID domain has been removed or has been exchanged into a different amino acid. Provided according to a preferred embodiment III is the isolated antibody or antigen-binding fragment according to preferred embodiment I or II, wherein the seven transmembrane receptor is a human, cynomolgus or mouse seven transmembrane receptor. Provided according to a preferred embodiment IV is the isolated antibody or antigen-binding fragment according to any of preferred embodiments I, II or III, wherein the seven transmembrane receptor is a) a CC chemokine receptor, preferably CCR1, CCR2, CCR3, CCR4, CCR5, CCR6, CCR7, CCR8, CCR9 or CCR10, b) a CXC chemokine receptor, preferably CXCR1, CXCR2, CXCR3, CXCR4, CXCR5, or CXCR6, or c) CX3CR1 or CXCR1. Provided according to a preferred embodiment V is an isolated antibody or antigen-binding fragment according to any of preferred embodiments I, II, III or IV, said first isolated sulfated polypeptide comprising or consisting of a sequence according to
[0818] a. SEQ ID NO:1, SEQ ID NO:4, SEQ ID NO:2, SEQ ID NO:5, SEQ ID NO:3 or SEQ ID NO:6, preferably wherein at least Y10 and/or Y18 have been sulfated, or
[0819] b. SEQ ID NO:7, SEQ ID NO:10, SEQ ID NO:8 or SEQ ID NO:11, preferably wherein at least Y26 has been sulfated, or
[0820] c. SEQ ID NO:9 or SEQ ID NO:12, preferably wherein at least Y37 and/or Y39 has been sulfated, or
[0821] d. SEQ ID NO:13 or SEQ ID NO:16, preferably wherein Y16 and/or Y17 have been sulfated, or
[0822] e. SEQ ID NO:14 or SEQ ID NO:17, preferably wherein Y16 has been sulfated, or
[0823] f. SEQ ID NO:15 or SEQ ID NO:18 preferably wherein Y20 and/or Y22 have been sulfated, or
[0824] g. SEQ ID NO:19, SEQ ID NO:22, SEQ ID NO:20, SEQ ID NO:23, SEQ ID NO:21 or SEQ ID NO:24, preferably wherein at least Y22 has been sulfated and preferably furthermore Y16, Y19 and/or Y20 have been sulfated, or
[0825] h. SEQ ID NO:25, SEQ ID NO:28, SEQ ID NO:26 or SEQ ID NO:29, preferably wherein two, three or all of Y3, Y10, Y14 and Y15 have been sulfated, or
[0826] i. SEQ ID NO:27 or SEQ ID NO:30, preferably wherein two or three of Y10, Y12 and Y16 have been sulfated, or
[0827] j. SEQ ID NO:31 or SEQ ID NO:34, preferably wherein at least two or three of Y18, Y26 and Y27 have been sulfated, or
[0828] k. SEQ ID NO:32 or SEQ ID NO:35, preferably wherein at least two or three of Y23, Y31 and Y32 have been sulfated, or
[0829] l. SEQ ID NO:33 or SEQ ID NO:36, preferably wherein at least two or three of Y13, Y18 and Y19 have been sulfated, or
[0830] m. SEQ ID NO:37, SEQ ID NO:40, SEQ ID NO:38 or SEQ ID NO:41, preferably wherein one or both of Y8 and Y17 have been sulfated, or
[0831] n. SEQ ID NO:39 or SEQ ID NO:42, preferably wherein one or both of Y8 and Y17 and optionally Y20 have been sulfated, or
[0832] o. SEQ ID NO:43, SEQ ID NO:44, SEQ ID NO:46 or SEQ ID NO:47, preferably wherein at least two or all of Y3, Y15 and Y17 have been sulfated, or
[0833] p. SEQ ID NO:45 or SEQ ID NO:48, preferably wherein at least two or all of Y3, Y14 and Y15 have been sulfated, or
[0834] q. SEQ ID NO:61, SEQ ID NO:64, SEQ ID NO:62 or SEQ ID NO:65, preferably wherein at least Y28, and preferably also Y17 and/or Y37 has been sulfated, or
[0835] r. SEQ ID NO:63 or SEQ ID NO:66, preferably wherein at least Y28 has been sulfated, and preferably also Y19 has been sulfated, or
[0836] s. SEQ ID NO:67, SEQ ID NO:70, SEQ ID NO:68 or SEQ ID NO:71, preferably wherein at least one or both of Y14 and Y22 has been sulfated, or
[0837] t. SEQ ID NO:69 or SEQ ID NO:72, preferably wherein at least one, two or all of Y14, Y17 and Y22 has been sulfated, or
[0838] u. SEQ ID NO:73 or SEQ ID NO:76, preferably wherein Y27 has been sulfated, or
[0839] v. SEQ ID NO:74 or SEQ ID NO:77, preferably wherein at least one of Y14 and Y28 has been sulfated, or
[0840] w. SEQ ID NO:75 or SEQ ID NO:78, preferably wherein at least Y6 has been sulfated, or
[0841] x. SEQ ID NO:79 or SEQ ID NO:82, preferably wherein Y23 and/or Y25 have been sulfated, or
[0842] y. SEQ ID NO:80 or SEQ ID NO:83, preferably wherein Y20 and/or Y22 have been sulfated, or
[0843] z. SEQ ID NO:81 or SEQ ID NO:84, preferably wherein Y24 has been sulfated, or
[0844] aa. SEQ ID NO:85, SEQ ID NO:88, SEQ ID NO:86, SEQ ID NO:89, SEQ ID NO:87 or SEQ ID NO:90, preferably wherein at least one or both of Y27 and Y29 have been sulfated, or
[0845] bb. SEQ ID NO:91, SEQ ID NO:94, SEQ ID NO:92 or SEQ ID NO:95, preferably wherein at least Y12 and/or Y21 have been sulfated, or
[0846] cc. SEQ ID NO:93 or SEQ ID NO:96, preferably wherein at least Y23 and/or Y14 have been sulfated, or
[0847] dd. SEQ ID NO:97, SEQ ID NO:100, SEQ ID NO:98 or SEQ ID NO:101, preferably wherein at least one of Y3 and Y27 have been sulfated, or
[0848] ee. SEQ ID NO:99 or SEQ ID NO:102, preferably wherein at least Y3 and/or Y14 and/or Y20 and/or Y26 have been sulfated, or
[0849] ff. SEQ ID NO:103 or SEQ ID NO:106, preferably wherein at least one or both of Y6 and Y10 has been sulfated, or
[0850] gg. SEQ ID NO:104 or SEQ ID NO:107, preferably wherein at least two or all of Y4, Y7 and Y39 have been sulfated, or
[0851] hh. SEQ ID NO:105 or SEQ ID NO:108, preferably wherein at least one or both of Y11 and Y15 have been sulfated, or
[0852] ii. SEQ ID NO:157 or SEQ ID NO:160, preferably wherein at least Y14 has been sulfated, or
[0853] jj. SEQ ID NO:158, preferably wherein at least Y20 has been sulfated, or
[0854] kk. SEQ ID NO:161, preferably wherein at least Y20 or Y22 has been sulfated, or
[0855] ll. SEQ ID NO:159 or SEQ ID NO:162, preferably wherein at least Y15 has been sulfated, or
[0856] mm. SEQ ID NO:163 or SEQ ID NO:166, preferably wherein at least Y27 has been sulfated, or
[0857] nn. SEQ ID NO:164, preferably wherein at least Y14 has been sulfated or
[0858] oo. SEQ ID NO:167, preferably wherein at least Y14 or Y28 has been sulfated, or
[0859] pp. SEQ ID NO:165 or SEQ ID NO:168, preferably wherein at least Y6 has been sulfated.

[0860] Provided according to a preferred embodiment VI is the isolated antibody or antigen-binding fragment according to any of preferred embodiments I, II, III, IV or V, wherein the dissociation constant or the EC50 of the antibody for binding the first isolated sulfated polypeptide and/or for said seven transmembrane receptor is below 150 nM, 100 nM, 10 nM, 5 nM, 2.5 nM, 1 nM, 0.5 or 0.25 nM. Provided according to a preferred embodiment VII is an isolated antibody or antigen-binding fragment according to any of preferred embodiments I to VI, wherein the isolated antibody or antigen-binding fragment specifically binds to a second isolated sulfated polypeptide which comprises the TRD of a seven transmembrane receptor, preferably wherein the seven transmembrane receptor of the TRD comprised by the second isolated sulfated polypeptide
[0861] a. is different from the seven transmembrane receptor of the TRD comprised by the first isolated sulfated polypeptide, or
[0862] b. is the corresponding seven transmembrane receptor of the TRD comprised by the first isolated sulfated polypeptide but from a different species.

[0863] Provided according to a preferred embodiment VIII is the isolated antibody or antigen-binding fragment according to preferred embodiment VII, wherein the dissociation constant or the EC50 of the antibody for binding the second isolated sulfated polypeptide and/or for binding the second seven transmembrane receptor is below 10 nM, 5 nM, 2.5 nM, 1 nM, 0.5 or 0.25 nM. Provided according to a preferred embodiment IX is an isolated antibody or antigen-binding fragment according to any of preferred embodiments I to VIII, wherein the dissociation constant (KD) of the antibody for binding the first isolated sulfated polypeptide is lower than the dissociation constant (KD) of the antibody for binding a first isolated non-sulfated polypeptide having the same sequence as the first isolated sulfated polypeptide. Provided according to a preferred embodiment X is the isolated antibody or antigen-binding fragment according to preferred embodiment IX, wherein the dissociation constant and/or EC50 of the antibody for binding the first isolated non-sulfated polypeptide is higher than 150 nM, 250 nM, 500 nM, 1 μM, 2 μM or 3 μM, or is not detectable. Provided according to a preferred embodiment XI is the isolated antibody or antigen-binding fragment according to any of preferred embodiments IX or X, wherein the dissociation constant or the EC50 of the antibody or fragment for binding the first isolated sulfated polypeptide is below 10 nM, 5 nM, 2.5 nM, 1 nM, 0.5 nM or 0.25 nM, and wherein the dissociation constant of the antibody or fragment for binding the first isolated non-sulfated polypeptide is higher than 10 nM, 25 nM, 50 nM, 100 nM, 250 nM or 500 nM, or is not detectable. Provided according to a preferred embodiment XII is the isolated antibody or antigen-binding fragment according to any of preferred embodiments I to XI, wherein the antibody comprises human, rat or mouse derived CDRs. Provided according to a preferred embodiment XIII is the isolated antibody or antigen-binding fragment according to any of preferred embodiments I to XII, wherein the antibody
[0864] a. comprises human derived CDRs, and/or
[0865] b. is cross reactive for human and cynomolgus, and/or
[0866] c. is characterized by a HCDR3 region comprising between 10 and 34% of tyrosine and/or between 2 and 20% of histidine, and/or
[0867] d. does not modulate G protein independent signaling of the seven transmembrane receptor, and/or
[0868] e. is a non-internalizing antibody or is characterized by an internalization into a cell with endogenous target expression which is lower than the 1.5, 2, 3, 4, 5, 6, 7, or 10-fold of the internalization of the isotype control, and/or
[0869] f. induces ADCC and/or ADCP
[0870] g. is a human, rat or murine IgG antibody, preferably a human IgG1 antibody or a murine IgG2a antibody, and/or
[0871] h. is an scFv, Fab, Fab′ or a F(ab′)2 fragment.

[0872] Provided according to a preferred embodiment XIV is a conjugate comprising an antibody or antigen-binding fragment according to any of preferred embodiments I to XIII, preferably wherein the conjugate comprises
[0873] a. a radioactive element,
[0874] b. a cytotoxic agent, such as an auristatin, a maytansinoid, a kinesin-spindle protein inhibitor, a nicotinamide phosphoribosyltransferase inhibitor or a pyrrolobenzodiazepine derivative,
[0875] c. a further antibody or antigen-binding fragment, or
[0876] d. a chimeric antigen receptor.

[0877] Provided according to a preferred embodiment XV is an antibody or antigen-binding fragment according to any of preferred embodiments I to XIII or a conjugate according to preferred embodiment XIV for use in the treatment of a tumor or a disease characterized by the involvement of cells expressing the seven transmembrane receptor, optionally in combination with an antibody targeting a checkpoint inhibitor. Provided according to a preferred embodiment XVI is the antibody or antigen-binding fragment according to any of preferred embodiments I to XIII or a conjugate according to preferred embodiment XIV for use as a diagnostic agent in vivo or in vitro. Provided according to a preferred embodiment XVII is a kit comprising an antibody or antigen-binding fragment according to any of preferred embodiments I to XIII or a conjugate according to preferred embodiment XIV with instructions for use.

### Antibodies Binding Ccr8

[0878] The following aspects 7, 8, 9, 10, 11, 12, 13, 14, 15, 16, 17 and 18 relate to antibodies specifically binding to CCR8. While each aspect is described individually, the different structural or functional aspects may be combined and are suggested to be combined with each other, except where obviously incompatible. Furthermore, each embodiment in each aspect may be combined with each embodiment in the same or in a different aspect, except where obviously incompatible.

[0879] If not explicitly stated otherwise, the CCR8 may be from any species e.g. human, monkey, Macaca fascicularis (cynomolgus monkey), Macaca mulatta (rhesus macaque), rodent, mouse, rat, horse, bovine, pig, dog, cat and camel CCR8. Antibodies binding CCR8 from at least two species, wherein one species is human, are highly preferred, and are suggested to be combined with each embodiment disclosed for these aspects. Antibodies having human derived CDRs are highly preferred and are suggested to be combined with each embodiment disclosed for these aspects. According to the current aspects, antibodies having a HCDR3 domain characterized by a frequency of at least 21% tyrosine residues and/or at least 2%, 7% or 10% histidine are highly preferred and are suggested to be combined with each embodiment disclosed for the current aspect. According to the current aspects, antibodies inducing both, ADCC and ADCP, such as afucosylated antibodies, are highly preferred, and are suggested to be combined with each embodiment disclosed for these aspects. According to the current aspects, low internalizing or non-internalizing antibodies or fragments are highly preferred and are suggested to be combined with each embodiment disclosed for these aspects. Some highly preferred characterizing features which are applicable for each of the described aspects are described under section “Preferred combinations according to ‘all aspects’”.

### Aspect 7—Ccr8 Antibody Binding Sulfated TRD

[0880] The extracellular domains of human CCR8 can be structured into four regions:

(i) an N-terminal domain which can be subdivided into
[0881] a) the membrane-distal tyrosine-rich domain (TRD), formed by amino acids 1 to 24 (SEQ ID NO:43)
[0882] b) a cysteine at amino acid position 25, and
[0883] c) a LID domain, formed by amino acids 26 to 35 (SEQ ID NO:49)
   (iii) an extracellular domain 1 (ECL1) according to SEQ ID NO:52,
   (iii) an extracellular domain 2 (ECL2) according to SEQ ID NO:55, and
   (iv) an extracellular domain 3 (ECL3) according to SEQ ID NO:58.

[0884] According to a 7^{th} aspect, which may be or may not be the same as the 6^{th} aspect, there is provided an isolated antibody or antigen-binding fragment thereof, specifically binding to the sulfated tyrosine rich domain of CCR8.

[0885] For example, the antibody or antigen-binding fragment binds to a first isolated sulfated polypeptide which comprises
[0886] a) the tyrosine rich domain (TRD) of CCR8 or
[0887] b) the N term of CCR8 including the TRD,
   optionally wherein at least the cysteine between the TRD and the LID domain has been removed or has been exchanged into a different amino acid. A sulfated polypeptide according to the current aspect is a polypeptide wherein preferably at least 25%, at least 50% or at least 75% of the tyrosine residues of the TRD are sulfated. Where the polypeptide comprises the N term of CCR8 including the TRD, preferably the cysteine between the TRD and the LID domain has been exchanged into a serine or has been removed. Without being bound by theory, the specific recognition of the provided sulfation pattern for CCR8 seems to influence if the antibody competes with CCL1, the natural ligand for CCR8, and also if and how the antibody agonizes or antagonizes the CCR8 signaling, e.g. as described according to the 11^{th} aspect.

[0888] In some preferred embodiments according to the current aspect, the inventive antibody binds sulfated TRD of human and/or cynomolgus CCR8 with a KD value of <5E-8 M, <4E-8 M, <3E-8 M, <2E-8 M, <1E-8 M, <9E-9 M, <8E-9 M, <7E-9 M, <6E-9 M, <5E-9 M, <4E-9 M, <3E-9 M, <2.5E-9 M, <2E-9 M, <1.5E-9 M, <1E-9 M, <9E-10 M, <8E-10 M, <7E-10 M, <6E-10 M, <5E-10 M, <4E-10 M, <3E-10 M, <2.5E-10 M, <2E-10 M, <1.5E-10 M, <1E-10 M, or <9E-11 M. For example, the inventive antibody may bind sulfated TRD of human and/or cynomolgus CCR8 with a KD value between <8E-9 M and >4E-10 M. For example, the inventive antibody may bind sulfated TRD of human and/or cynomolgus CCR8 with a KD value between <8E-9 M and >5.5E-10 M. In some further preferred of these embodiments, the inventive antibody binds the sulfated N term (i.e. comprising the aforementioned sulfated TRD) of human and/or cynomolgus CCR8 with substantially the same KD value. In some most preferred of these embodiments, the inventive antibody does substantially not bind non-sulfated TRD of human and/or cynomolgus CCR8.

[0889] In some preferred embodiments according to the current aspect, the inventive antibody binds sulfated N term of human and/or cynomolgus CCR8 with a KD value of <5E-8 M, <4E-8 M, <3E-8 M, <2E-8 M, <1E-8 M, <9E-9 M, <8E-9 M, <7E-9 M, <6E-9 M, <5E-9 M, <4E-9 M, <3E-9 M, <2.5E-9 M, <2E-9 M, <1.5E-9 M, <1E-9 M, <9E-10 M, <8E-10 M, <7E-10 M, <6E-10 M, <5E-10 M, <4E-10 M, <3E-10 M, <2.5E-10 M, <2E-10 M, <1.5E-10 M, <1E-10 M, <9E-11 M, <8E-11 M, <7E-11 M, <6E-11 M, or <5E-11 M. For example, the inventive antibody may bind sulfated N term of human and/or cynomolgus CCR8 with a KD value between <8E-9 M and >8E-11 M. For example, the inventive antibody may bind sulfated N term of human and/or cynomolgus CCR8 with a KD value between <8E-9 M and >7.5E-11 M. In some further preferred of these embodiments, the inventive antibody binds sulfated TRD (i.e., a subsequence of the aforementioned sulfated N term) of human and/or cynomolgus CCR8 with substantially the same KD value or a KD value within the same order of magnitude. In some most preferred of these embodiments, the inventive antibody does substantially not bind non-sulfated TRD of human and/or cynomolgus CCR8.

[0890] According to some first embodiments of the 7^{th} aspect, the first isolated sulfated polypeptide comprises
[0891] a) SEQ ID NO:43 (CCR8_HUMAN_TRD), preferably wherein at least two or all of Y3, Y15 and Y17 have been sulfated,
[0892] b) SEQ ID NO:44 (CCR8_MACFA_TRD), preferably wherein at least two or all of Y3, Y15 and Y17 have been sulfated, and/or
[0893] c) SEQ ID NO:45 (CCR8_MOUSE_TRD), preferably wherein at least two or all of Y3, Y14 and Y15 have been sulfated.

[0894] According to some second embodiments of the 7^{th} aspect, the first isolated sulfated polypeptide comprises
[0895] a) SEQ ID NO:46 (CCR8_HUMAN_N term with C=X or S), preferably wherein at least two or all of Y3, Y15 and Y17 have been sulfated,
[0896] b) SEQ ID NO:47 (CCR8_MACFA_N term with C=X or S), preferably wherein at least two or all of Y3, Y15 and Y17 have been sulfated, and/or
[0897] c) SEQ ID NO:48 (CCR8_MOUSE_N term with C=X or S), preferably wherein at least two or all of Y3, Y14 and Y15 have been sulfated.

[0898] According to some third embodiments of the 7^{th} aspect, which may be the same as or different from the first and/or second embodiments, the antibody or antigen-binding fragment specifically binds to the first isolated sulfated polypeptide with a dissociation constant or an EC50 of <15 nM, <10 nM, <5 nM, <1 nM or <0.6 nM.

[0899] According to some preferred of these embodiments, the isolated antibody or antigen-binding fragment thereof, specifically binds with a dissociation constant or an EC50 of <15 nM, <10 nM, <5 nM, <1 nM or <0.6 nM
[0900] a) to human CCR8 or to an isolated polypeptide according to SEQ ID NO:46, wherein at least two or all of Y3, Y15 and Y17 have been sulfated,
[0901] b) to cynomolgus CCR8 or to an isolated polypeptide according to SEQ ID NO:47, wherein at least two or all of Y3, Y15 and Y17 have been sulfated, and/or
[0902] c) to murine CCR8 or to an isolated polypeptide according to SEQ ID NO:48, wherein at least two or all of Y3, Y14 and Y15 have been sulfated.

[0903] According to some fourth embodiments of the 7^{th} aspect, which may be and are suggested to be combined with the first, second, and/or third embodiments of the 7^{th} aspect, the dissociation constant (KD) of the antibody for binding the first isolated sulfated polypeptide is lower than the dissociation constant (KD) of the antibody for binding an isolated non-sulfated polypeptide having the same sequence as the first isolated sulfated polypeptide.

[0904] According to some embodiments A of these fourth embodiments, the dissociation constant or EC50 of the antibody for binding the isolated non-sulfated polypeptide is higher than 1 pM, 10 nM, 25 nM, 50 nM, 100 nM, 150 nM, 200 nM, 250 nM, 300 nM, 350 nM, 400 nM, 450 nM, 500 nM, 600 nM, 700 nM, 800 nM, 900 nM, 1 μM, 1.25 μM, 1.5 μM, 1.75 μM, 2 μM, 2.25 μM, 2.5 μM, 2.75 μM, or 3 μM, 5 μM or is not detectable. Preferably, the dissociation constant or EC50 of the antibody for binding the isolated non-sulfated polypeptide is higher than 100 nM, 250 nM, 500 nM, 1 μM, 2 μM or 3 μM, or is not detectable.

[0905] According to some embodiments B of these fourth embodiments, which may be the same as the embodiments A of the these second embodiments, the dissociation constant or the EC50 of the antibody for binding the first isolated sulfated polypeptide is below 10 nM, 5 nM, 2.5 nM, 1 nM, 0.5 nM or 0.25 nM, and the dissociation constant or the EC50 of the antibody for binding the isolated non-sulfated polypeptide is higher than 10 nM, 25 nM, 50 nM, 100 nM, 250 nM or 500 nM, or is not detectable.

### Aspect 8—CCR8 Antibody Comprising Human CDRs

[0906] According to an 8^{th} aspect, which may be or may not be the same as the 6^{th} or 7^{th} aspect, there is provided an isolated antibody or antigen-binding fragment thereof, (specifically) binding to CCR8, wherein the antibody comprises human derived CDRs. Most preferably, the antibody or antigen-binding fragment thereof, (specifically) binds to the sulfated TRD of CCR8. According to some preferred embodiments, a single CDR comprises less than 1, 2, 3, 4, 5 or 6 deviations from the closest human germline. According to some highly preferred embodiments, the human derived CDRs comprise no deviations or less than 1, 2, 3, 4, 5, 6, 7, 8, 9, 10, 11, 12, 13, 14 or 15 deviations from the closest human germline. The closest human germline may be determined as known in the art, e.g. in silico using IgBLAST with data retrieved from the IMGT human germline database, as discussed elsewhere herein.

[0907] While humanization of antibodies with non-human CDRs may improve the immunogenicity, residual immunogenicity resides in the CDR regions (Harding, Fiona A., et al. “The immunogenicity of humanized and fully human antibodies: residual immunogenicity resides in the CDR regions.” MAbs. Vol. 2. No. 3. Taylor & Francis, 2010). Antibodies according to the current aspect comprising human derived CDRs and a low number of germline deviations are thus assumed to have a superior suitability as therapeutic agents.

[0908] Antibodies comprising human derived CDRs can be obtained as described herein, for example by using a human phage display library as described in examples 4 and 6. In the alternative, antibodies with human CDRs can also be produced using transgenic mice which are incapable of expressing functional endogenous immunoglobulins, but which can express human immunoglobulin genes. Furthermore, antibodies comprising human CDRs may also be generated by using in vitro activated B cells (see, U.S. Pat. Nos. 5,567,610 and 5,229,275, each of which is incorporated herein by reference in its entirety). The provided isolated antibody or antigen-binding fragment comprising human derived CDRs is preferably also an antibody according to any of aspects 9, 10, 11, 12, 13, 14, 15, 16, 17 or 18 or a combination thereof.

### Aspect 9—Cross Reactive Ccr8 Antibody

[0909] According to a 9^{th} aspect, which may be or may not be the same as the 6^{th}, 7^{th} and/or 8^{th} aspect, there is provided an isolated antibody or antigen-binding fragment thereof, specifically binding to CCR8, wherein the antibody or antigen-binding fragment is cross reactive for CCR8 from at least two species, preferably selected from human, monkey, Macaca fascicularis (cynomolgus monkey), Macaca mulatta (rhesus macaque), rodent, mouse, rat, horse, bovine, pig, dog, cat and camel, even more preferably selected from human, cynomolgus and mouse. According to some most preferred embodiments, the antibody or antigen-binding fragment is cross reactive for human and cynomolgus CCR8.

[0910] In preferred embodiments, the antibody or antigen-binding fragment binds the CCR8 from a first species with a first dissociation constant KD and binds the CCR8 from a second species with a second dissociation constant KD, wherein the first and the second dissociation constant are in the same order of magnitude. As understood by the skilled person, an order-of-magnitude difference between two values is a factor of 10.

[0911] Cross reactive anti-CCR8 antibodies are advantageous for the development of a therapeutic antibody because they can be used in non-human animal models to characterize the therapeutic agents with regards to pharmacological data and safety before the antibodies are administered to humans. However, cross reactive antibodies with similar binding behavior in two species are difficult to generate, because the parts of CCR8 which can be used for antibody recognition have a low homology between species (see example 2). According to the current invention, cross reactive antibodies for CCR8 can be generated by using small sulfated tyrosine comprising motifs which have a higher conservation between species, such that cross reactive antibodies binding CCR8 from two or more species with affinities in the same order of magnitude could be obtained in an easy and convenient way. In more detail, the antibodies specifically bind sulfated TRD motifs and cross-reactive antibodies can be obtained because these sulfated TRD motifs are conserved between species.

[0912] In some preferred embodiments according to the current aspect, the inventive antibody binds sulfated TRD of human and cynomolgus CCR8 with a KD value of <5E-8 M, <4E-8 M, <3E-8 M, <2E-8 M, <1E-8 M, <9E-9 M, <8E-9 M, <7E-9 M, <6E-9 M, <5E-9 M, <4E-9 M, <3E-9 M, <2.5E-9 M, <2E-9 M, <1.5E-9 M, <1E-9 M, <9E-10 M, <8E-10 M, <7E-10 M, <6E-10 M, <5E-10 M, <4E-10 M, <3E-10 M, <2.5E-10 M, <2E-10 M, <1.5E-10 M, <1E-10 M, or <9E-11 M. For example, the inventive antibody may bind sulfated TRD of human and cynomolgus CCR8 with a KD value between <8E-9 M and >4E-10 M. For example, the inventive antibody may bind sulfated TRD of human and cynomolgus CCR8 with a KD value between <8E-9 M and >5.5E-10 M. In some further preferred of these embodiments, the inventive antibody binds the sulfated N term (i.e. comprising the aforementioned sulfated TRD) of human and cynomolgus CCR8 with substantially the same KD value or a KD within one order of magnitude. In some most preferred of these embodiments, the inventive antibody does substantially not bind non-sulfated TRD of human and cynomolgus CCR8.

[0913] In some preferred embodiments according to the current aspect, the inventive antibody binds sulfated N term of human and cynomolgus CCR8 with a KD value of <5E-8 M, <4E-8 M, <3E-8 M, <2E-8 M, <1E-8 M, <9E-9 M, <8E-9 M, <7E-9 M, <6E-9 M, <5E-9 M, <4E-9 M, <3E-9 M, <2.5E-9 M, <2E-9 M, <1.5E-9 M, <1E-9 M, <9E-10 M, <8E-10 M, <7E-10 M, <6E-10 M, <5E-10 M, <4E-10 M, <3E-10 M, <2.5E-10 M, <2E-10 M, <1.5E-10 M, <1E-10 M, <9E-11 M, <8E-11 M, <7E-11 M, <6E-11 M, or <5E-11 M. For example, the inventive antibody may bind sulfated N term of human and cynomolgus CCR8 with a KD value between <8E-9 M and >8E-11 M. For example, the inventive antibody may bind sulfated N term of human and cynomolgus CCR8 with a KD value between <8E-9 M and >7.5E-11 M. In some further preferred of these embodiments, the inventive antibody binds sulfated TRD (i.e., a subsequence of the aforementioned sulfated N term) of human and cynomolgus CCR8 with substantially the same KD value or a value in the same order of magnitude. In some most preferred of these embodiments, the inventive antibody does substantially not bind non-sulfated TRD of human and cynomolgus CCR8.

[0914] According to some first embodiments of the 9^{th} aspect, the antibody specifically binds to
[0915] a) a first isolated sulfated polypeptide comprising SEQ ID NO:46 (CCR8_HUMAN_N term with C=X or S), preferably wherein at least two or all of Y3, Y15 and Y17 have been sulfated, and a second isolated sulfated polypeptide comprising SEQ ID NO:47 (CCR8_MACFA_N term with C=X or S), preferably wherein at least two or all of Y3, Y15 and Y17 have been sulfated, or
[0916] b) a first isolated sulfated polypeptide comprising SEQ ID NO:43 (CCR8_HUMAN_TRD), preferably wherein at least two or all of Y3, Y15 and Y17 have been sulfated, and a second isolated sulfated polypeptide comprising SEQ ID NO:44 (CCR8_MACFA_TRD), preferably wherein at least two or all of Y3, Y15 and Y17 have been sulfated.

[0917] Preferably, the EC50 of the antibody or antigen-binding fragment for binding human CCR8 or for binding the first isolated sulfated polypeptide is below 200 nM, 150 nM, 100 nM, 10 nM, 5 nM, 2.5 nM, 1 nM, 0.5 or 0.25 nM, such as below 10 nM, 5 nM, 2.5 nM, 1 nM, 0.5 or 0.25 nM. Preferably, the EC50 of the antibody or antigen-binding fragment for binding cynomolgus CCR8 or for binding the second isolated sulfated polypeptide is below 10 nM, 5 nM, 2.5 nM, 1 nM, 0.5 or 0.25 nM. In some preferred embodiments, the antibodies bind the first isolated sulfated polypeptide and the second isolated sulfated polypeptide with substantially the same affinity.

[0918] According to some second embodiments of the 9^{th} aspect, the antibody specifically binds to
[0919] a) a first isolated sulfated polypeptide comprising SEQ ID NO:46 (CCR8_HUMAN_N term with C=X or S), preferably wherein at least two or all of Y3, Y15 and Y17 have been sulfated, and a second isolated sulfated polypeptide comprising SEQ ID NO:48 (CCR8_MOUSE_N term with C=X or S), preferably wherein at least two or all of Y3, Y14 and Y15 have been sulfated, or
[0920] b) a first isolated sulfated polypeptide comprising SEQ ID NO:43 (CCR8_HUMAN_TRD), preferably wherein at least two or all of Y3, Y15 and Y17 have been sulfated, and a second isolated sulfated polypeptide comprising SEQ ID NO:45 (CCR8_MOUSE_TRD), preferably wherein at least two or all of Y3, Y14 and Y15 have been sulfated.

[0921] Preferably, the EC50 of the antibody or antigen-binding fragment for binding human CCR8 or for binding the first isolated sulfated polypeptide is below 200 nM, 150 nM, 100 nM, 10 nM, 5 nM, 2.5 nM, 1 nM, 0.5 or 0.25 nM, such as below 10 nM, 5 nM, 2.5 nM, 1 nM, 0.5 or 0.25 nM. Preferably, the EC50 of the antibody or antigen-binding fragment for binding murine CCR8 or for binding the second isolated sulfated polypeptide is below 10 nM, 5 nM, 2.5 nM, 1 nM, 0.5 or 0.25 nM. In some preferred embodiments, the antibodies bind the first isolated sulfated polypeptide and the second isolated sulfated polypeptide with substantially the same affinity.

[0922] The provided isolated antibody or antigen-binding fragment is preferably also an antibody according to any of aspects 7, 8, 10, 11, 12, 13, 14, 15, 16, 17 or 18 or a combination thereof.

### Aspect 10—CCR8 Antibody Defined by HCDR3 Structure

[0923] According to a 10^{th} aspect, which may be or may not be the same as the 6^{th}, 7^{th}, 8^{th} and/or 9^{th} aspect, there is provided an isolated antibody or antigen-binding fragment thereof, specifically binding to CCR8, wherein the antibody or antigen-binding fragment is characterized by a HCDR3 region with increased histidine and/or tyrosine frequency. As understood by the skilled person, although the frequency for each amino acid is discussed separately, the respective frequencies are interrelated and are suggested to be combined, except where the skilled person immediately recognizes their incompatibility. For determination of CDR regions, the immunoglobulin amino acid residue numbering system of Kabat was used herein and shall be decisive in case of doubt.

[0924] It was surprisingly found, that the CCR8 antibodies according to the current invention were characterized by a HCDR3 having substantially higher frequencies of tyrosine residues than would be expected for a random fully human HCDR3 with matched length (˜10%, cf. Zemlin, Michael, et al. “Expressed murine and human CDR-H3 intervals of equal length exhibit distinct repertoires that differ in their amino acid composition and predicted range of structures.” Journal of molecular biology 334.4 (2003): 733-749). On average, the initial set of inventive antibodies comprised ˜20.6% tyrosine residues, while the optimized set of specific human CCR8 binding antibodies comprised on average 21% tyrosine residues in the HCDR3.

[0925] Furthermore, the number of positively charged amino acids and in particular the number of histidine residues was higher than expected, in particular in the optimized set of antibodies with improved therapeutic features, cf. example 9. On average, when summed up, histidine residues and tyrosine residues accounted for 31% of all amino acids in the HCDR3 of the optimized set of CCR8 binding antibodies. Interestingly, the used antigen comprising the sulfated TRD, is characterized by tyrosine residues and a particularly high number of negative charges, which was further increased by sulfation. Without being bound by theory, the inventors believe that the preference for a high tyrosine and histidine content in the CDRH3 of the inventive antibodies is caused by the particular sulfated motif of the antigen and that a high tyrosine/histidine content in the HCDR3 promotes the specific recognition of the antigen. Without being bound by theory, the inventors furthermore believe, that this specific recognition influences the characteristics of the obtained antibodies as a modulator of CCR8, e.g. as discussed in aspect 11.

[0926] In some highly preferred embodiments of the 10^{th} aspect, there is provided an isolated antibody or antigen-binding fragment thereof, specifically binding to CCR8, wherein the antibody or fragment is characterized by a HCDR3 region comprising between 10 and 34% of tyrosine and/or between 2 and 20% of histidine.

[0927] The provided isolated antibody or antigen-binding fragment is preferably also an antibody according to any of aspects 7, 8, 9, 11, 12, 13, 14, 15, 16, 17 or 18 or a combination thereof.

[0928] In some first embodiments of the 10^{th} aspect, the isolated antibody or antigen-binding fragment comprises a HCDR3 having
[0929] a)>0 and <35%, >8 and <34%, ≥10 and ≤34%, or >15 and <31% tyrosine (Y) residues, and/or
[0930] b)>0 and ≤16%, ≥2 and ≤20% or ≥7 and ≤20% histidine (H) residues, and
[0931] c) preferably >0 and ≤18%, ≥7 and ≤10% or ≥0 and ≤7% arginine (R) residues, and/or
[0932] d) preferably >0 and ≤25%, ≥7 and ≤16% or ≥7 and ≤13% aspartic acid (D) residues, and/or
[0933] e) preferably no lysine (K) residues, and/or
[0934] f) preferably no glutamic acid (E) residues.

[0935] In some second embodiments of the 10^{th} aspect, which may be the same as or different from the first embodiments, the isolated antibody or antigen-binding fragment comprises a HCDR3 having
[0936] a)>0 and <47%, >22 and <50%, >10 and <34%, or >15 and <47% charged amino acids, and/or
[0937] b)>0 and <32%, >8 and <30%, or >10 and <37% positively charged amino acids, and/or
[0938] c)>0 and <26%, ≥7 and <16%, or >7 and <14% negatively charged amino acids.

[0939] In some third embodiments of the 10^{th} aspect, which may be the same as or different from the first and/or second embodiments, the isolated antibody or antigen-binding fragment comprises a HCDR3 having >0 and ≤42%, ≥10 and ≤42% or ≥36 and ≤43% histidine and tyrosine residues in total.

### Tyrosine (Y)

[0940] In some preferred embodiments the isolated antibody or antigen-binding fragment comprises a HCDR3 having 33%, 31%, 25%, 23%, 21%, 20%, 18%, 15%, 10%, 9%, 8% or 0% tyrosine. In some highly preferred embodiments, the isolated antibody or antigen-binding fragment comprises a HCDR3 having (a)>0 and <35%, (b) >8 and <34%, (c) >10 and <34%, or (d) >15 and <31% tyrosine.

[0941] In some embodiments the isolated antibody or antigen-binding fragment comprises a HCDR3 having >8, >9, >10,>11,>12,>13,>14,>15,>16,>17,>18,>19, >20, >21, >22, >23, >24, >25, >26, >27, >28, >29, >30, >31, >32, >33% tyrosine residues. In some embodiments the isolated antibody or antigen-binding fragment comprises a HCDR3 having <35, <34, <33, <32, <31, <30, <29, <28, <27, <26, <25, <24, <23, <22, <21, <20, <19, <18, <17, <16, <15, <14 <13, <12, <11, <10, <9 or <8% tyrosine residues.

[0942] In some embodiments the isolated antibody or antigen-binding fragment comprises a HCDR3 having >0 and <34%,>1 and <34%,>2 and <34%,>3 and <34%,>4 and <34%,>5 and <34%,>6 and <34%,>7 and <34%,>8 and <34%,>9 and <34%,>10 and <34%,>11 and <34%,>12 and <34%, >13 and <34%, >14 and <34%, >15 and <34%, >16 and <34%, >17 and <34%, >18 and <34%, >19 and <34%, >20 and <34%, >21 and <34%, >22 and <34%, >23 and <34%, >24 and <34%,>25 and <34%,>26 and <34%,>27 and <34%,>28 and <34%,>29 and <34% or >30 and <34% tyrosine residues.

[0943] In some embodiments the isolated antibody or antigen-binding fragment comprises a HCDR3 having >0 and <36%,>0 and <35%,>0 and <34%,>0 and <33%,>0 and <32%,>0 and <31%,>0 and <30%,>0 and <29%,>0 and <28%,>0 and <27%,>0 and <26%,>0 and <25%,>0 and <24%, >0 and <23%,>0 and <22%,>0 and <21%,>0 and <20%,>0 and <19%,>0 and <18%,>0 and <17%,>0 and <16%, or >0 and <15%,>0 and <14%,>0 and <13%,>0 and <12%,>0 and <11%,>0 and <10%,>0 and <9%,>0 and <8%,>0 and <7%→0 and <6%,>0 and <5% tyrosine residues.

### Charged aa

[0944] In some preferred embodiments the isolated antibody or antigen-binding fragment comprises a HCDR3 having 47%, 39%, 31%, 28%, 27%, 25%, 23%, 20%, 18%, 17%, 16%, 15%, 9% or 0% charged amino acids. In some highly preferred embodiments, the isolated antibody or antigen-binding fragment comprises a HCDR3 having (a)>0 and <47%, (b)>22 and <50%, (c)>10 and <34%, or (d)>15 and <47% charged amino acids.

### Positively Charged aa

[0945] In some preferred embodiments the isolated antibody or antigen-binding fragment comprises a HCDR3 having 31%, 23%, 18%, 15%, 10%, 8%, 7%, or 0% positively charged amino acids. In some highly preferred embodiments, the isolated antibody or antigen-binding fragment comprises a HCDR3 having (a)>0 and <32%, (b)>8 and <30%, or (c)>10 and <37% positively charged amino acids.

### Negatively Charged aa

[0946] In some preferred embodiments the isolated antibody or antigen-binding fragment comprises a HCDR3 having 25%, 17%, 15%, 11%, 10%, 9%, 8%, 7%, or 0% negatively charged amino acids. In some highly preferred embodiments, the isolated antibody or antigen-binding fragment comprises a HCDR3 having (a)>0 and <26%, (b)≥7 and <16%, or (c)>7 and <14% negatively charged amino acids.

### Histidine (H)

[0947] In some preferred embodiments the isolated antibody or antigen-binding fragment comprises a HCDR3 having 0%, 3%, 7%, 8%, 10% or 15 histidine residues. Preferably, the isolated antibody or antigen-binding fragment comprises a HCDR3 having at least one histidine residue. In some highly preferred embodiments, the isolated antibody or antigen-binding fragment comprises a HCDR3 having (a)>0 and ≤16%, (b)≥2 and ≤20% or (c)≥7 and ≤20% histidine residues.

[0948] In some embodiments the isolated antibody or antigen-binding fragment comprises a HCDR3 having ≥0, >0, >1, >2, >3, >4, >5, >6, >7, >8, >9, >10, >11, >12, >13, >14, >15, >16, >17, >18, >19, >20% histidine residues. In some embodiments the isolated antibody or antigen-binding fragment comprises a HCDR3 having <20, <19, <18, <17, <16, <15, <14<13, <12, <11, <10, <9, <8, <7, <6, <5, <4, <3, <2 or <1% histidine residues.

[0949] In some embodiments the isolated antibody or antigen-binding fragment comprises a HCDR3 having >0 and <24%,>land <24%,>2 and <24%,>3 and <24%,>4 and <24%,>5 and <24%,>6 and <24%, >7 and <24%, >8 and <24%, >9 and <24%, >10 and <24%, >11 and <24%, >12 and <24%, >13 and <24%, >14 and <24%, >15 and <24%, >16 and <24%, >17 and <24%, >18 and <24%,>19 and <24%,>20 and <24%,>21 and <24%,>22 and <24% or >23 and <24% histidine residues.

[0950] In some embodiments the isolated antibody or antigen-binding fragment comprises a HCDR3 having >0 and <24%,>0 and <23%,>0 and <22%,>0 and <21%,>0 and <20%,>0 and <19%,>0 and <18%, >0 and <17%, >0 and <16%, or >0 and <15%, >0 and <14%, >0 and <13%, >0 and <12%,>0 and <11%,>0 and <10%,>0 and <9%,>0 and <8%,>0 and <7%,>0 and <6%,>0 and <5%, >0 and <4%, >0 and <3%, >0 and <2% or >0 and <1% histidine residues.

### Histidine+Tyrosine

[0951] In some preferred embodiments the isolated antibody or antigen-binding fragment comprises a HCDR3 having 42%, 38%, 33%, 31%, 30%, 24%, 23%, 18%, 15%, 10%, 9% or 0% histidine and tyrosine residues in total. Preferably, the isolated antibody or antigen-binding fragment comprises a HCDR3 having at least one histidine residue. In some highly preferred embodiments, the isolated antibody or antigen-binding fragment comprises a HCDR3 having (a)>0 and ≤42%, (b)≥10 and ≤42% or (c)≥36 and ≤43% histidine and tyrosine residues in total.

### Arginine (R)

[0952] In some preferred embodiments the isolated antibody or antigen-binding fragment comprises a HCDR3 having 0%, 7%, 8%, 10%, 15% or 18% arginine residues. In some highly preferred embodiments, the isolated antibody or antigen-binding fragment comprises a HCDR3 having (a)>0 and ≤18%, (b)≥7 and ≤10% or (c)≥0 and ≤7% arginine residues.

### Lysine (K)

[0953] In some embodiments the isolated antibody or antigen-binding fragment comprises a HCDR3 having 0% to 8% lysine residues. In some embodiments, the isolated antibody or antigen-binding fragment comprises a HCDR3 having no lysine residues.

### Aspartic Acid (D)

[0954] In some preferred embodiments the isolated antibody or antigen-binding fragment comprises a HCDR3 having 0%, 7%, 8%, 9%, 10%, 11%, 15%, 16%, 17% or 25% aspartic acid residues. In some highly preferred embodiments, the isolated antibody or antigen-binding fragment comprises a HCDR3 having (a)>0 and ≤25%, (b)≥7 and ≤16% or (c)≥7 and ≤13% aspartic acid residues.

### Glutamic Acid (E)

[0955] In some embodiments the isolated antibody or antigen-binding fragment comprises a HCDR3 having 0%, 8%, or 9% glutamic acid residues. In some highly preferred embodiments, the isolated antibody or antigen-binding fragment comprises a HCDR3 having no glutamic acid residues.

### Length

[0956] In some embodiments the isolated antibody or antigen-binding fragment comprises a HCDR3 having a length of 3, 4, 5, 6, 7, 8, 9, 10, 11, 12, 13, 14, 15, 16, 17, 18, 19, or 20 amino acids. Preferably, the isolated antibody or antigen-binding fragment comprises a HCDR3 having a length of 10, 11, 12 or 13 amino acid residues or a length between 8 and 13 amino acid residues.

### Aspect 11—Blocking/Neutral CCR8 Antibody

[0957] There are multiple different ways how an antibody can modulate CCR8 signaling. For example, an antibody can
[0958] a) block G-protein independent signaling,
[0959] b) block G-protein dependent signaling,
[0960] c) block G-protein dependent and G-protein independent signaling,
[0961] d) increase G-protein independent signaling,
[0962] e) increase G-protein dependent signaling,
[0963] f) increase G-protein dependent and G-protein independent signaling.

[0964] According to an 11^{th} aspect, which may be or may not be the same as the 6^{th}, 7^{th}, 8^{th}, 9^{th} and/or 10^{th} aspect, there is provided an isolated antibody or antigen-binding fragment thereof, specifically binding to CCR8, wherein the antibody or antigen-binding fragment at least partially modulates CCR8 signaling. For CCR8, G-protein independent signaling pathways are β-arrestin signaling (example 10.4.1), phospho Erk1/2 signaling (phosphorylation of Erk1/2), and phospho Akt signaling (phosphorylation of AKT) (example 10.4.2). Further subtypes of antagonists or agonist can be defined based on the impact on these three G-protein independent signaling pathways.

[0965] According to some first embodiments of the 11^{th} aspect, the antibody or antigen-binding fragment
[0966] a) does not block CCL1 induced β-arrestin signaling and/or
[0967] b) does not induce ERK1/2 phosphorylation and/or
[0968] c) does not induce AKT phosphorylation.

[0969] Example 10.4.1 shows that the prior art antibodies 433H and L268G8 efficiently blocked CCL1 induced β-arrestin signaling, e.g. with IC50 values below 20 nM (cf. table 10.4.1.1), while no IC50 value could be determined for inventive antibodies such as TPP-23411.

[0970] According to some embodiments A of the first embodiments of the 11^{th} aspect, the antibody or antigen-binding fragment does not block CCL1 induced β-arrestin signaling. In case of doubt, an antibody blocks CCL1 induced β-arrestin signaling, if the IC50 is below 100 nM. In case of doubt, an antibody does not block CCL1 induced β-arrestin signaling, if the IC50 is ≥100 nM, or if no IC50 can be determined with the assay system described herein. CCL1 induced β-arrestin signaling has been linked to receptor internalization as discussed for the 12^{th} aspect.

[0971] Example 10.4.2, FIG. 27, 28 show that prior art antibodies induce phosphorylation of Erk1/2 in CHO cells expressing human CCR8 or human activated Tregs, e.g. after 15 minutes, at least by a factor of 1.5. Instead, the inventive antibody TPP-23411 did not induce a significant phosphorylation of Erk1/2. According to some embodiments B of the first embodiments of the 11^{th} aspect, the antibody or antigen-binding fragment does not induce ERK1/2 phosphorylation. In case of doubt, an antibody induces phosphorylation of Erk1/2, if—using an assay as described herein—at least a 1.5-fold increase of Erk1/2 phosphorylation levels over control can be detected. In case of doubt, an antibody does not induce phosphorylation of Erk1/2, if no significant increase of Erk1/2 phosphorylation levels is detected or if the increase is below 1.5-fold over control.

[0972] Example 10.4.2, FIG. 30, show that prior art antibodies induce phosphorylation of AKT, e.g. after 15 minutes at least by a factor of 1.5. Instead, the inventive antibody TPP-23411 did not induce a significant phosphorylation of AKT.

[0973] According to some embodiments C of the first embodiments of the 11^{th} aspect, the antibody or antigen-binding fragment does not induce AKT phosphorylation. In case of doubt, an antibody induces phosphorylation of AKT, if—using an assay as described herein—at least a 1.5-fold increase of AKT phosphorylation levels over control can be detected. In case of doubt, an antibody does not induce phosphorylation of AKT, if no significant increase of AKT phosphorylation levels is detected or if the increase is below 1.5-fold over control.

[0974] Antibodies or fragments which show no induction of G-protein independent signaling pathways such as AKT or ERK1/2 phosphorylation are assumed to have advantages in therapy because induction of G-protein dependent signaling may lead to unwanted effects and side effects.

[0975] To analyze G-protein dependent signaling, the Ca flux assay as known in the art and as described herein can be used as a read out. The majority of tested inventive antibodies were found to be fully efficacious antagonists of G protein dependent Ca signaling, however, differences in the IC50 could be determined in comparison with the prior art antibodies.

[0976] Example 10.4.3 shows that several of the tested anti-CCR8 antibodies blocked CCL1 induced G protein dependent Ca signaling, e.g. with IC50 values in the low nM or even sub nM range.

[0977] According to some second embodiments of the 11^{th} aspect, which can be the same as or different from the first embodiments, the antibody or antigen-binding fragment blocks CCL1 induced calcium signaling. In some preferred of these embodiments, the antibody or antigen binding fragment blocks CCL1 induced calcium signaling, e.g. with an IC50<1 nM, <0.5 nM or <0.01 nM.

[0978] According to some third embodiments of the 11^{th} aspect, which can be the same as or different from the first embodiments, the antibody or antigen-binding fragment does not block CCL1 induced G protein dependent calcium signaling.

### Aspect 12—None and/or Low Internalizing CCR8 Antibody

[0979] An anti-CCR8 antibody can be a non-internalizing, low internalizing, medium internalizing or high internalizing antibody or antigen-binding fragment.

[0980] According to a 12^{th} aspect, which may be or may not be the same as the 6^{th}, 7^{th}, 8^{th}, 9^{th}, 10^{th} and/or 11^{th} aspect, there is provided an isolated antibody or antigen-binding fragment thereof, specifically binding to CCR8, wherein the antibody or antigen-binding fragment is a non-internalizing or low internalizing antibody or antigen binding fragment.

[0981] Depending on the specific mode of action of an antibody, fragment or conjugate, internalization into a cell may be desired or has to be avoided, as discussed elsewhere herein. The antibodies according to the 12^{th} aspect are particularly suited for an ADCC/ADCP approach, or any other mode of action relying on the antibody or antigen binding fragment for recruiting effector cells.

[0982] Because overexpression may impact the internalization behavior and is less suited to model internalization in a therapeutic setting, internalization is preferably determined using a model cell line with endogenous expression of the target. Where the target is human CCR8, the cell endogenously expressing the target is preferably HuT78. Where the target is murine CCR8, the cell endogenously expressing the target is preferably murine BW5147.3. HuT78 and mBW5147.3 can be obtained from ATCC.

[0983] While all prior art antibodies readily internalized into cells with endogenous target expression, as shown in example 10.5, the tested antibodies TPP-21360, TPP-21047 (data not shown) and TPP-23411 and various further antibodies according to the current invention did not significantly internalize.

[0984] For example, internalization can be determined over a time frame or for specific time points. Preferably internalization can be determined after 15 min, 30 min, 1 h, 2 h, 3 h, 6 h, 12 h, 24 h or 48 h in a cell endogenously expressing the target.

[0985] According to some first embodiments of the 12^{th} aspect, the antibody or antigen-binding fragment is characterized by an internalization into a cell with endogenous target expression which is lower than the 1.5, 2, 3, 4, 5, 6, 7, or 10-fold of the internalization of the isotype control. The isotype control for an antibody can be selected as known in the art to match the isotype of the antibody as closely as possible, but without binding the target.

[0986] According to some of these embodiments, the antibody or antigen-binding fragment is characterized by an internalization into a cell with endogenous target expression which is lower than 150%, 175%, 200%, 300%, 400% or 500% of the internalization of the isotype control e.g. after 15 min, 30 min, 1 h, 2 h, 3 h, 6 h, 12 h, 24 h or 48 h, preferably wherein the cell with endogenous target expression is a HuT78 lymphoma cell.

[0987] According to some preferred of these embodiments, the antibody or antigen-binding fragment has an internalization rate in the same order of magnitude as the internalization rate of the isotype control.

[0988] According to some second embodiments of the 12^{th} aspect, which may be the same as or different from the first embodiments, the antibody or antigen-binding fragment specifically binds human CCR8 and is characterized by a time until half of the amount of antibody, fragment or conjugate has been internalized which is >2 hours, preferably >4, >5, >6, >7, >8, >9, >10,>11,>12,>13,>14,>15,>16,>17,>18, >19, >20, >21, >22, >23, >24, >26, >28, >30, or >48 hours in a cell endogenously expressing the target, or no such time can be determined at all, preferably wherein the cell endogenously expressing the target is a HuT78 lymphoma cell. For example, the anti-CCR8 antibody has a lower internalization rate than antibodies 433H and L263G8 (BioLegend Cat. No. 360602).

[0989] According to some third embodiments of the 12^{th} aspect, which may be the same as or different from the first or second embodiments, the antibody or antigen-binding fragment specifically binds murine CCR8 and has a lower internalization rate than antibody SA214G2 in a cell endogenously expressing the target, preferably wherein the cell endogenously expressing the target is a murine lymphoma cell line BW5147.3.

[0990] The provided isolated antibody or antigen-binding fragment is preferably also an antibody according to any of aspects 7, 8, 9, 10, 11, 13, 14, 15, 16, 17 or 18 or a combination thereof.

### Aspect 13—ADCC/ADCP Inducing CCR8 Antibody

[0991] To induce the killing of CCR8 expressing cells such as activated Tregs, multiple modes of action can be envisioned. One mode of action is the conjugation of an antibody targeting CCR8 to a drug in the form of an antibody drug conjugate (ADC). Other possible modes of action are ADCC, CDC and ADCP. For ADCC, CDC and ADCP, a two-step mechanism is involved: On the one hand, the antibody or fragment is required to effectively bind the target cell, e.g. the Treg via CCR8, on the other hand, the FC part of the antibody (or an alternative binding moiety which can be conjugated to the antibody or fragment as described elsewhere herein) has to bind to an effector cell, which will then mediate the killing of the target cell. For ADCP, binding to macrophages as effector cells typically occurs via the interaction of the antibodies FC part with FcγRIIa (CD32a) expressed by macrophages. In contrast, ADCC is mediated via interaction of the antibody or fragment with FcγRIIIa. In humans, FcγRIII exists in two different forms: FcγRIIIa (CD16a) and FcγRIIIb (CD16b). While FcγRIIIa is expressed on mast cells, macrophages, and natural killer cells as a transmembrane receptor, FcγRIIIb is only expressed on neutrophils. These receptors bind to the Fc portion of IgG antibodies, which then activates antibody-dependent cell-mediated cytotoxicity (ADCC) mediated by the human effector cells.

[0992] In case of doubt, where ADCC and/or ADCP induction is analyzed, at least 80% and preferably at least 85% of the target cells are required to show CCR8 expression.

[0993] According to a 13^{th} aspect, which may be or may not be the same as the 6^{th}, 7^{th}, 8^{th}, 9^{th}, 10^{th}, 11^{th} and/or 12^{th} aspect, there is provided an isolated antibody or antigen-binding fragment thereof, specifically binding to CCR8, wherein the antibody or antigen-binding fragment induces ADCC and/or ADCP.

[0994] For example, there is provided an isolated antibody or antigen-binding fragment thereof specifically binding to CCR8, wherein the antibody or antigen-binding fragment is afucosylated and a) induces antibody-dependent cell-mediated cytotoxicity (ADCC) in target cells expressing human CCR8 via human effector cells, such as human NK cells, and b) induces antibody-dependent cell-mediated phagocytosis (ADCP) in target cells expressing human CCR8 via human effector cells, such as human macrophages, preferably wherein the maximal ADCC and ADCP induced in vitro depletion of target cells expressing human CCR8 is at least 30%, 35%, 40%, 45%, 50%, 55%, 60%, 70%, 80%, 90%, 95% or 99%. In case of doubt, ADCC and ADCP shall be determined using target cells where at least 85% of the cells express CCR8.

[0995] In some preferred embodiments of the 13^{th} aspect, the antibody or antigen-binding fragment is afucosylated. Afucosylated antibodies are antibodies engineered such that the oligosaccharides in the Fc region of the antibody do not have any fucose sugar units. Afucosylated antibodies can be obtained as known in the art, e.g. as described in example 10.3. Example 10.3.2 demonstrates the improved binding of the afucosylated versions of the inventive antibodies to FcγRIIIa. The binding to FcγRIIa was likewise slightly improved. Afucosylation furthermore increased the binding to cynomolgus Fc gamma RIII, cf. Table 10.3.2.1.

### ADCC

[0996] In some first embodiments A of the 13^{th} aspect, the antibody or antigen-binding fragment binds to human Fc gamma receptor IIIA variant V176 (CD16a) with a dissociation constant (KD) lower than 530 nM, 500 nM, 450 nM, 400 nM, 300 nM or 200 nM.

[0997] In some first embodiments B of the 13^{th} aspect, which may be the same as or different from the first embodiments A, the antibody or antigen-binding fragment induces antibody-dependent cell-mediated cytotoxicity (ADCC) in target cells expressing human CCR8 via human effector cells, such as human NK cells. ADCC induction can be analyzed with an assay known in the art, for example as described according to examples 10.3.3 ff.

[0998] In some first embodiments C of the 13^{th} aspect, which may be the same as or different from the first embodiments A or B, the ADCC-induced maximal depletion of activated human regulatory T cells is at least 25%, 30%, 35%, 40%, 45%, 50%, 55%, 60%, 70%, 80%, 90%, 95%, 98% or 99%, preferably, where at least 85% of the activated human regulatory T cells have CCR8 expression, cf. Table 10.3.3.1.2 and Table 10.3.3.1.3.

[0999] In some first embodiments D of the 13^{th} aspect, which may be the same as or different from the first embodiments A, B or C, the EC50 for ADCC-induced depletion of activated human regulatory T cells is below 500 pM, 400 pM, 300 pM, 200 pM, 100 pM, 50 pM, 25 pM, 20 pM, 12.5 pM, 10 pM, 5 pM or 2.5 pM. Preferably, at least 85% of the activated human regulatory T cells have CCR8 expression.

### ADCP

[1000] In some second embodiments A of the 13^{th} aspect, which may or may not be the same as the first embodiments A, B, C and/or D, the antibody or antigen-binding fragment binds to human Fc gamma RITA (CD32a) with a dissociation constant (KD) lower than 30 μM, 20 μM, 10 μM, 5 μM or 1 μM.

[1001] In some second embodiments B of the 13^{th} aspect, which may be the same as the first embodiments A, B, C and/or D, and which may be the same as the second embodiments A, the antibody or antigen-binding fragment induces antibody-dependent cell-mediated phagocytosis (ADCP) in target cells expressing human CCR8 via human effector cells, such as human macrophages. For example, the human macrophages can be M2c or M1 macrophages.

[1002] In some second embodiments C of the 13^{th} aspect, which may the same as the first embodiments A, B, C and/or D, and which may the same as the second embodiments A and/or B, the ADCP-induced maximal depletion of activated human regulatory T cells is at least 5%, 10%, 15%, 20%, 25%, 30%, 40% or 50%.

[1003] In some second embodiments D of the 13^{th} aspect, which may the same as the first embodiments A, B, C and/or D, and which may the same as the second embodiments A, B and/or C, the EC50 for ADCP-induced depletion of activated human regulatory T cells is below 1500 pM, 1000 pM, 500 pM, 250 pM, 200 pM, 150 pM, 100 pM, 75 pM, 50 pM, 25 pM or 10 pM.

[1004] In some preferred embodiments there is provided an isolated antibody or antigen-binding fragment thereof, specifically binding to CCR8, wherein the antibody or antigen-binding fragment
[1005] a) binds to human Fc gamma receptor IIIA variant V176 (CD16a) with a dissociation constant (KD) lower than 530 nM, 500 nM, 450 nM, 400 nM, 300 nM or 200 nM, and/or
[1006] b) binds to human Fc gamma RITA (CD32a) with a dissociation constant (KD) lower than 30 μM, 20 μM, 10 μM, 5 μM or 1 μM.

[1007] In some preferred embodiments there is provided an isolated antibody or antigen-binding fragment thereof, specifically binding to CCR8, wherein the antibody or antigen-binding fragment
[1008] a) induces antibody-dependent cell-mediated cytotoxicity (ADCC) in target cells expressing human CCR8 via human effector cells, such as human NK cells, and/or
[1009] b) induces antibody-dependent cell-mediated phagocytosis (ADCP) in target cells expressing human CCR8 via human effector cells, such as human macrophages.

[1010] In some preferred embodiments there is provided an isolated antibody or antigen-binding fragment thereof, specifically binding to CCR8, wherein
[1011] a) the ADCC-induced maximal depletion of activated human regulatory T cells is at least 30%, 40%, 50%, 60%, 70%, 80%, 90%, 95%, 98% or 99%, and/or
[1012] b) the ADCP-induced maximal depletion of activated human regulatory T cells is at least 5%, 10%, 15%, 20%, 25%, 30%, 40% or 50%, and/or
[1013] c) the maximal depletion of intra-tumoral regulatory T cells, in vitro or in a subject, is at least 50%, 60%, 70%, 80%, 90%, 95% or 99%.

[1014] In some preferred embodiments there is provided an isolated antibody or antigen-binding fragment thereof, specifically binding to CCR8, wherein
[1015] a) the EC50 for ADCC-induced depletion of activated human regulatory T cells is below 200 pM, 100 pM, 50 pM, 25 pM, 12.5 pM, 10 pM or 5 pM and/or
[1016] b) the EC50 for ADCP-induced depletion of activated human regulatory T cells is below 500 pM, 250 pM, 200 pM, 150 pM, 100 pM, 75 pM, 50 pM or 25 pM.

[1017] The provided isolated antibody or antigen-binding fragment is preferably also an antibody according to any of aspects 14, 15, 16, 17 or 18 or a combination thereof.

### Aspect 14—Treg Modulatory CCR8 Antibody

[1018] The therapeutic in vivo effects of the antibodies according to the current invention are shown in examples 12 ff. The ability of an antibody to modulate absolute and relative numbers of several immune cell populations is structurally realized by a combination of target binding properties and FC receptor interaction, e.g. as described according to the 7^{th}, 10^{th}, 12^{th}, and/or 13^{th} aspect or a combination thereof.

[1019] According to a 14^{th} aspect, which may be or may not be the same as the 6^{th}, 7^{th}, 8^{th}, 9^{th}, 10^{th}, 11^{th}, 12^{th}, and/or 13^{th} aspect, there is provided an isolated antibody or antigen-binding fragment thereof, specifically binding to CCR8, wherein the antibody or antigen-binding fragment depletes activated regulatory T cells, preferably intra-tumoral Tregs. Example 12.1.1 shows high levels of T reg depletion obtained with the inventive antibodies in various mouse models, wherein the surrogate antibodies are characterized by comparable functional features as the provided anti-human CCR8 antibodies. Interestingly, a superior therapeutic response was observed in those cases, where the Treg depletion was at least 50%. Treg depletion may be measured in vitro or in vivo. As understood by the skilled person, the Treg depletion may be a temporal depletion. For example, Treg depletion may be analyzed 24, 48 or 72 hours after treatment.

[1020] According to some first embodiments of the 14^{th} aspect, an effective dose of the antibody or antigen-binding fragment is characterized by a maximal depletion of activated or intra-tumoral regulatory T cells, in vitro or in a subject, of at least 45%, 50%, 55%, 60%, 70%, 80%, 90%, 95% or 99%.

[1021] Determination in vitro or in vivo may occur as known in the art. Determination in vivo may occur as described in examples 12 ff. Suitable subjects include for example human and non-human, such as mouse (e.g. CT26 model or EMT-6 model), rodent, or cynomolgus.

[1022] According to some second embodiments of the 14^{th} aspect, which may or may not be the same as the first embodiments, an effective dose of the antibody or antigen-binding fragment decreases the number of activated or intra-tumoral regulatory T cells, in vitro or in a subject, to less than 55%, 50%, 40%, 30%, 25%, 20%, 10%, 5% or 1%. The decrease may be a temporary decrease. For example, and without being bound by theory, the pool of intra-tumoral Tregs may be subsequently replenished.

[1023] According to some third embodiments of the 14^{th} aspect, which may or may not be the same as the first and/or second embodiments, an effective dose of the antibody or antigen-binding fragment increases the ratio of intra-tumoral CD8+ T cells to intra-tumoral Tregs, in vitro or in a subject, to at least 5, 10, 15, 20, 25, 30, 40, 50, 60, 70, 80, 90, 100, 150, 200, or higher. The increase may be a temporary increase.

[1024] According to some fourth embodiments of the 14^{th} aspect, which may or may not be the same as the first, second and/or third embodiments, an effective dose of the antibody or antigen-binding fragment decreases the percentage of regulatory T cells of intra-tumoral CD4+ T cells, in vitro or in a subject, to <30%, <20%, <10% or <5%. The decrease may be a temporary decrease.

[1025] In preferred embodiments, an effective dose of the antibody or antigen-binding fragment
[1026] a) decreases the number of activated or intra-tumoral regulatory T cells, in vitro or in a subject, to less than 30%, 25%, 20%, 10%, 5% or 1% and/or
[1027] b) increases the ratio of intra-tumoral CD8+ T cells to intra-tumoral Tregs, in vitro or in a subject, to at least 5, 10, 15, 20, 25, 30, 40, 50, 60, 70, 80, 90, 100, 150, 200, or higher and/or
[1028] c) decreases the percentage of regulatory T cells of intra-tumoral CD4+ T cells, in vitro or in a subject, to <30%, <20%, <10% or <5%.

[1029] Antibodies according to the current aspect were superior in terms of therapeutic efficacy, see examples 12 ff. The provided isolated antibody or antigen-binding fragment is preferably also an antibody according to any of aspects 15, 16, 17 or 18 or a combination thereof.

### Aspect 15—Immune Cell Modulatory CCR8 Antibody

[1030] According to a 15^{th} aspect, which may be or may not be the same as the 6^{th}, 7^{th}, 8^{th}, 9^{th}, 10^{th}, 11^{th}, 12^{th}, 13^{th} and/or 14^{th} aspect, there is provided an isolated antibody or antigen-binding fragment thereof, specifically binding to CCR8, wherein an effective dose of the antibody or antigen-binding fragment increases the absolute numbers of immune cells in a defined tumor volume, e.g. at least by a factor of 1.5, 2, 2.5, 3, 3.5 or 4.

[1031] Example 12.8 shows a massive increase in the mRNA expression levels for various global or specific immune cell markers in responsive tumors from different subjects at the study end. An increase was observed e.g. for macrophages (in particular M1 macrophages), CD8+ T cells, NK cells, CD3+ T cells, B cells, and interestingly also activated Tregs, suggesting an increased infiltration of these immune cell populations within the tumor after chronic treatment. The increase in absolute immune cell numbers was also confirmed by FACS, see example 12.3 (CT26), example 12.4 (EMT6), example 12.5 (F9). Suitable subjects include for example human and non-human subjects, such as mouse, rodent, or cynomolgus. For example, the increase of immune cells can be determined after one, two, three or four effective doses of the antibody, cf. example 12.3, 12.4.2 and also after chronic treatment, e.g. after the final treatment. For example, the tumor may be a tumor characterized by tumor infiltrating lymphocytes, e.g. a tumor characterized by tumor infiltrating T cells or a tumor characterized by expression of proinflammatory cytokines.

[1032] According to some first embodiments of the 15^{th} aspect, the immune cells are at least one, two, three, four, five, six, seven, eight or nine selected from
[1033] a) (intra-tumoral) CD45+ cells,
[1034] b) (intra-tumoral) CD8+ T cells,
[1035] c) (intra-tumoral) CD4+ T cells,
[1036] d) (intra-tumoral) macrophages, such as M1 macrophages or M2 macrophages,
[1037] e) (intra-tumoral) NK cells,
[1038] f) (intra-tumoral) B cells,
[1039] g) (intra-tumoral) Dendritic cells,
[1040] h) (intra-tumoral) Gamma delta T cells (unconventional T cells), and
[1041] i) iNKT cells.

[1042] The respective cell types and populations are defined as known in the art, and in particular as defined elsewhere herein.

[1043] According to some highly preferred of these first embodiments, three or more effective doses of the antibody or antigen-binding fragment, in a tumor, increase
[1044] a) the number of intra-tumoral CD8+ T cells to at least 150%, 200%, 250%, 300% or 350%,
[1045] b) the ratio of intra-tumoral CD8+ T cells to intra-tumoral regulatory T cells to at least 4, 5, 10, 15, 20, 25, 30, 40, 50, 60, 70, 80, 90, 100, 150, 200, or higher,
[1046] c) the number of intra-tumoral macrophages at least by a factor of 2, 3, 4, or 5,
[1047] d) the number of intra-tumoral ACOD1+ macrophages (M1 macrophages) at least by a factor of 2, 3, 4, 5, 6, 7, 8, 9 or 10,
[1048] e) the ratio of ACOD1+ macrophages (M1 macrophages) to MRC1+ macrophages (M2 macrophages) to at least 1.5, 2, 3, 4, 5, 10, or higher,
[1049] f) the number of intra-tumoral NK cells to at least 140% or 200%,
[1050] g) the number of intra-tumoral CD3+ T cells to at least 150%, 200%, 300% or 400%,
[1051] h) the number of intra-tumoral B cells at least by a factor of 2, 5, 10, 20, 30 or 40,
[1052] i) the number of intra-tumoral CD45+ T cells to at least 150%, 200% or 300%, and/or
[1053] j) the number of intra-tumoral CD4+ T cells to at least 150%, 200%, 300% or 400%.

[1054] The tumor is preferably a tumor characterized by tumor infiltrating lymphocytes. As understood by the skilled person, the tumor is characterized by cells expressing the target CCR8 of the inventive antibody or fragment, e.g. intratumoral Tregs. Preferably, the tumor is a tumor in a syngeneic tumor model derived from a BALB/c strain. For example, as shown in example 12.1.1, the tumor can be derived from the CT26 model, EMT-6 model, F9 model, C38, H22 or B16F10-OVA model, where the antibody specifically binds to murine CCR8. For example, where the antibody specifically binds to human CCR8, the tumor can be selected from Adrenal cancer (e.g. Adrenocortical carcinoma or Pheochromocytoma), Bladder cancer (e.g. Transitional cell carcinoma, Transitional cell carcinoma-Papillary), Brain cancer (e.g. Glioma-Astrocytoma, Glioma-Astrocytoma-Glioblastoma, Glioma-Oligoastrocytoma, Glioma-Oligodendroglioma), Breast cancer (e.g. ADC, ADC-Ductal, ADC-Ductal-TNBC, ADC-Ductal-TPBC, ADC-Lobular), Colorectal cancer (e.g. ADC), Esophageal cancer (e.g. ADC), Esophageal cancer (e.g. SCC), Gastric cancer (e.g. ADC, ADC-Diffuse, ADC-Intestinal, ADC-Intestinal-Tubular), Head and Neck cancer (e.g. Laryngeal cancer-SCC, SCC, Oral cancer-SCC), Kidney cancer (e.g. ccRCC, Chromophobe, Papillary, Papillary-Type I, Papillary-Type II), Liver cancer (e.g. HCC), Lung cancer (e.g. NSCLC-ADC, NSCLC-ADC-Mixed, NSCLC-SCC, SCLC), Mesothelioma (e.g. Epithelioid), Ovarian cancer (e.g. ADC-Cystadenocarcinoma-Papillary serous), Pancreatic cancer (e.g. ADC-Ductal), Prostate cancer (e.g. ADC-Acinar type), Sarcoma (e.g. Leiomyosarcoma, Liposarcoma-Dedifferentiated, Malignant fibrous histiocytoma), Skin cancer (e.g. Melanoma), Testicular cancer (e.g. Germ cell tumor-Seminoma), Thymoma, Thyroid cancer (e.g. Follicular carcinoma, Papillary carcinoma-Classical variant), Uterine cancer (e.g. Cervical-SCC, Cervical-SCC-Keratinizing, Cervical-SCC-Non-keratinizing, Endometrial-ADC-Endometrioid, Endometrial-ADC-Papillary serous, Endometrial-Carcinosarcoma-Malignant mixed mullerian tumor), cf. Table 11.1.2.

[1055] In some of these embodiments, the immune cells are
[1056] a) CD8+ T cells, CD4+ T cells, and macrophages,
[1057] b) CD8+ T cells, CD4+ T cells, NK cells,
[1058] c) CD8+ T cells, CD4+ T cells, CD45+ cells,
[1059] d) CD8+ T cells, CD4+ T cells, NK cells and macrophages,
[1060] e) CD8+ T cells, CD4+ T cells, NK cells, and macrophages, e.g. ACOD1+ macrophages,
[1061] f) CD8+ T cells, CD4+ T cells, NK cells, CD45+ cells,
[1062] g) CD8+ T cells, CD4+ T cells, NK cells, CD45+ cells, and macrophages, e.g. ACOD1+ macrophages,
[1063] h) CD8+ T cells, ACOD1+ macrophages (M1 macrophages), and B cells,
[1064] i) CD8+ T cells, CD4+ T cells, and dendritic cells, wherein the dendritic cells are characterized by expression of CD1c, CD14, CD16, CD141, CD11c and CD123, or
[1065] j) CD8+ T cells and Acod1+ macrophages (M1 macrophages).

[1066] In some preferred of these embodiments, the immune cells are
[1067] a) CD8+ T cells, CD4+ T cells, and macrophages, or
[1068] b) CD8+ T cells, CD4+ T cells, NK cells and macrophages, or
[1069] c) CD8+ T cells, ACOD1+ macrophages (M1 macrophages), and B cells.

[1070] According to some further embodiments, the immune cells are CD45+ cells and CD8+ T cells, CD45+ cells and CD4+ T cells, CD45+ cells and macrophages (such as M1 macrophages or M2 macrophages), CD45+ cells and NK cells, CD45+ cells and B cells, CD45+ cells and Dendritic cells, CD45+ cells and Gamma delta T cells, CD45+ cells and iNKT cells, CD8+ T cells and CD4+ T cells, CD8+ T cells and macrophages (such as M1 macrophages or M2 macrophages), CD8+ T cells and NK cells, CD8+ T cells and B cells, CD8+ T cells and Dendritic cells, CD8+ T cells and Gamma delta T cells, CD8+ T cells and iNKT cells, CD4+ T cells and macrophages (such as M1 macrophages or M2 macrophages), CD4+ T cells and NK cells, CD4+ T cells and B cells, CD4+ T cells and Dendritic cells, CD4+ T cells and Gamma delta T cells, CD4+ T cells and iNKT cells, macrophages (such as M1 macrophages or M2 macrophages) and NK cells, macrophages (such as M1 macrophages or M2 macrophages) and B cells, macrophages (such as M1 macrophages or M2 macrophages) and Dendritic cells, macrophages (such as M1 macrophages or M2 macrophages) and Gamma delta T cells, macrophages (such as M1 macrophages or M2 macrophages) and iNKT cells, B cells and Dendritic cells, B cells and Gamma delta T cells, B cells and iNKT cells, Dendritic cells and Gamma delta T cells, Dendritic cells and iNKT cells, or Gamma delta T cells and iNKT cells.

[1071] The provided isolated antibody or antigen-binding fragment is preferably also an antibody according to any of aspects 16, 17 or 18 or a combination thereof.

### Aspect 16—CCR8 Antibody Forming Tertiary Lymphoid Structures

[1072] According to a 16^{th} aspect, which may be or may not be the same as the 6^{th}, 7^{th}, 8^{th}, 9^{th}, 10^{th}, 11^{th}, 12^{th}, 13^{th}, 14^{th} and/or 15^{th} aspect, there is provided an isolated antibody or antigen-binding fragment thereof, specifically binding to CCR8, wherein the antibody or antigen-binding fragment induces the formation of tertiary lymphoid structures. Tertiary lymphoid structures are intra-tumoral structures characterized by increased expression of LTta, LTtb, Cxcr5 and its ligand Cxcl13. Tertiary lymphoid structures have been described as key drivers of an anti-tumor effect in humans. Without being bound by theory, the inventors believe, that the formation of these substructures might contribute to the altered pattern in immune cells and an anti-tumor effect of the inventive antibodies, e.g. in humans. As discussed in example 12.8, chronic treatment with the inventive antibodies consistently increased the expression levels for LTta, LTtb as well as Cxcr5 and its ligand Cxcl13.

### Seq Defined Antibodies

[1073] The antibodies according to the following two aspects 17 and 18 were obtained with a method according to aspect 3 or 4. The resulting antibodies according to aspect 17 and 18 specifically bind to a polypeptide comprising the sulfated TRD of a human chemokine receptor, e.g. wherein at least 50% of the tyrosine residues have been sulfated. As discussed previously herein, the method influences the specific structural features of the HCDR3 of the obtained antibodies and may also influence functional features, such as the modulation of G protein independent signaling or internalization behavior.

[1074] Where CDRs, variable heavy chains, variable light chains, heavy chains or light chains are disclosed, the modular nature of the antibodies typically allows their combination, but also the combination with the various functional features, as described elsewhere herein.

### Aspect 17—Anti-Human CCR8 Antibody (Seq Defined)

[1075] According to a 17^{th} aspect, which may be or may not be the same as the 6^{th}, 7^{th}, 8^{th}, 9^{th}, 10^{th}, 11^{th}, 12^{th}, 13^{th}, 14^{th}, 15^{th} and/or 16^{th} aspect, there is provided an isolated anti-CCR8 antibody or antigen-binding fragment thereof.

[1076] Preferably the antibodies according to the current aspect bind (a) to an isolated polypeptide according to SEQ ID NO:43 and/or SEQ ID NO:46, wherein at least two or all of Y3, Y15 and Y17 have been sulfated, and (b) to an isolated polypeptide according to SEQ ID NO:44 and/or SEQ ID NO:47, wherein at least two or all of Y3, Y15 and Y17 have been sulfated, and the antibodies are thus cross reactive for human and cynomolgus CCR8. Furthermore, the antibodies are preferably characterized by properties making them particularly suitable for therapy, e.g. are antibodies according to at least one or more of aspects 7, 8, 9, 10, 11, 12, 13, 14, 15 or 16.

[1077] According to some preferred embodiments, the isolated anti-CCR8 antibody or antigen-binding fragment thereof comprises at least one, two, and preferably three, four, five or six CDR sequence(s) having at least 90%, 95%, 98% or 100% sequence identity with any of
[1078] a) SEQ ID NO:258, SEQ ID NO:259, SEQ ID NO:260, SEQ ID NO:262, SEQ ID NO:263 or SEQ ID NO:264 (TPP-16966),
[1079] b) SEQ ID NO:276, SEQ ID NO:277, SEQ ID NO:278, SEQ ID NO:280, SEQ ID NO:281 or SEQ ID NO:282 (TPP-17575),
[1080] c) SEQ ID NO:294, SEQ ID NO:295, SEQ ID NO:296, SEQ ID NO:298, SEQ ID NO:299 or SEQ ID NO:300 (TPP-17576),
[1081] d) SEQ ID NO:312, SEQ ID NO:313, SEQ ID NO:314, SEQ ID NO:316, SEQ ID NO:317 or SEQ ID NO:318 (TPP-17577),
[1082] e) SEQ ID NO:330, SEQ ID NO:331, SEQ ID NO:332, SEQ ID NO:334, SEQ ID NO:335 or SEQ ID NO:336 (TPP-17578),
[1083] f) SEQ ID NO:348, SEQ ID NO:349, SEQ ID NO:350, SEQ ID NO:352, SEQ ID NO:353 or SEQ ID NO:354 (TPP-17579),
[1084] g) SEQ ID NO:366, SEQ ID NO:367, SEQ ID NO:368, SEQ ID NO:370, SEQ ID NO:371 or SEQ ID NO:372 (TPP-17580),
[1085] h) SEQ ID NO:384, SEQ ID NO:385, SEQ ID NO:386, SEQ ID NO:388, SEQ ID NO:389 or SEQ ID NO:390 (TPP-17581),
[1086] i) SEQ ID NO:402, SEQ ID NO:403, SEQ ID NO:404, SEQ ID NO:406, SEQ ID NO:407 or SEQ ID NO:408 (TPP-18205),
[1087] j) SEQ ID NO:420, SEQ ID NO:421, SEQ ID NO:422, SEQ ID NO:424, SEQ ID NO:425 or SEQ ID NO:426 (TPP-18206),
[1088] k) SEQ ID NO:438, SEQ ID NO:439, SEQ ID NO:440, SEQ ID NO:442, SEQ ID NO:443 or SEQ ID NO:444 (TPP-18207),
[1089] l) SEQ ID NO:456, SEQ ID NO:457, SEQ ID NO:458, SEQ ID NO:460, SEQ ID NO:461 or SEQ ID NO:462 (TPP-19546),
[1090] m) SEQ ID NO:474, SEQ ID NO:475, SEQ ID NO:476, SEQ ID NO:478, SEQ ID NO:479 or SEQ ID NO:480 (TPP-20950),
[1091] n) SEQ ID NO:492, SEQ ID NO:493, SEQ ID NO:494, SEQ ID NO:496, SEQ ID NO:497 or SEQ ID NO:498 (TPP-20955),
[1092] o) SEQ ID NO:510, SEQ ID NO:511, SEQ ID NO:512, SEQ ID NO:514, SEQ ID NO:515, or SEQ ID NO:516 (TPP-20965),
[1093] p) SEQ ID NO:528, SEQ ID NO:529, SEQ ID NO:530, SEQ ID NO:532, SEQ ID NO:533 or SEQ ID NO:534 (TPP-21045),
[1094] q) SEQ ID NO:546, SEQ ID NO:547, SEQ ID NO:548, SEQ ID NO:550, SEQ ID NO:551 or SEQ ID NO:552 (TPP-21047),
[1095] r) SEQ ID NO:564, SEQ ID NO:565, SEQ ID NO:566, SEQ ID NO:568, SEQ ID NO:569 or SEQ ID NO:570 (TPP-21181),
[1096] s) SEQ ID NO:582, SEQ ID NO:583, SEQ ID NO:584, SEQ ID NO:586, SEQ ID NO:587 or SEQ ID NO:588 (TPP-21183),
[1097] t) SEQ ID NO:600, SEQ ID NO:601, SEQ ID NO:602, SEQ ID NO:604, SEQ ID NO:605 or SEQ ID NO:606 (TPP-21360),
[1098] u) SEQ ID NO:618, SEQ ID NO:619, SEQ ID NO:620, SEQ ID NO:622, SEQ ID NO:623 or SEQ ID NO:624 (TPP-23411),
[1099] v) SEQ ID NO:661, SEQ ID NO:662, SEQ ID NO:663, SEQ ID NO:665, SEQ ID NO:666 or SEQ ID NO:667 (TPP-29596),
[1100] w) SEQ ID NO:681, SEQ ID NO:682, SEQ ID NO:683, SEQ ID NO:685, SEQ ID NO:686 or SEQ ID NO:687 (TPP-29597),
[1101] x) SEQ ID NO:703, SEQ ID NO:704, SEQ ID NO:705, SEQ ID NO:707, SEQ ID NO:708 or SEQ ID NO:709 (TPP-18429),
[1102] y) SEQ ID NO:723, SEQ ID NO:724, SEQ ID NO:725, SEQ ID NO:727, SEQ ID NO:728 or SEQ ID NO:729 (TPP-18430),
[1103] z) SEQ ID NO:743, SEQ ID NO:744, SEQ ID NO:745, SEQ ID NO:747, SEQ ID NO:748 or SEQ ID NO:749 (TPP-18432),
[1104] aa) SEQ ID NO:763, SEQ ID NO:764, SEQ ID NO:765, SEQ ID NO:767, SEQ ID NO:768 or SEQ ID NO:769 (TPP-18433),
[1105] bb) SEQ ID NO:783, SEQ ID NO:784, SEQ ID NO:785, SEQ ID NO:787, SEQ ID NO:788 or SEQ ID NO:789 (TPP-18436),
[1106] cc) SEQ ID NO:803, SEQ ID NO:804, SEQ ID NO:805, SEQ ID NO:807, SEQ ID NO:808 or SEQ ID NO:809 (TPP-19571),
[1107] dd) SEQ ID NO:827, SEQ ID NO: 828, SEQ ID NO: 829, SEQ ID NO: 831, SEQ ID NO:832 or SEQ ID NO:833 (TPP-27477),
[1108] ee) SEQ ID NO:847, SEQ ID NO: 848, SEQ ID NO: 849, SEQ ID NO: 851, SEQ ID NO:852 or SEQ ID NO:853 (TPP-27478),
[1109] ff) SEQ ID NO:867, SEQ ID NO: 868, SEQ ID NO: 869, SEQ ID NO: 871, SEQ ID NO:872 or SEQ ID NO:873 (TPP-27479),
[1110] gg) SEQ ID NO:887, SEQ ID NO: 888, SEQ ID NO: 889, SEQ ID NO: 891, SEQ ID NO:892 or SEQ ID NO:893 (TPP-27480),
[1111] hh) SEQ ID NO:907, SEQ ID NO: 908, SEQ ID NO: 909, SEQ ID NO: 911, SEQ ID NO:912 or SEQ ID NO:913 (TPP-29367),
[1112] ii) SEQ ID NO:927, SEQ ID NO: 928, SEQ ID NO: 929, SEQ ID NO: 931, SEQ ID NO:932 or SEQ ID NO:933 (TPP-29368), and/or
[1113] jj) SEQ ID NO:947, SEQ ID NO: 948, SEQ ID NO: 949, SEQ ID NO: 951, SEQ ID NO:952 or SEQ ID NO:953 (TPP-29369).

[1114] According to some preferred embodiments, the isolated anti-CCR8 antibody or antigen-binding fragment thereof comprises a HCDR3 sequence having at least 90%, 95%, 98% or 100% sequence identity with any of SEQ ID NO:260 (TPP-16966), SEQ ID NO:278 (TPP-17575), SEQ ID NO:296 (TPP-17576), SEQ ID NO:314 (TPP-17577), SEQ ID NO:332 (TPP-17578), SEQ ID NO:350 (TPP-17579), SEQ ID NO:368 (TPP-17580), SEQ ID NO:386 (TPP-17581), SEQ ID NO:404 (TPP-18205), SEQ ID NO:422 (TPP-18206), SEQ ID NO:440 (TPP-18207), SEQ ID NO:458 (TPP-19546), SEQ ID NO:476 (TPP-20950), SEQ ID NO:494 (TPP-20955), SEQ ID NO:512 (TPP-20965), SEQ ID NO:530 (TPP-21045), SEQ ID NO:548 (TPP-21047), SEQ ID NO:566 (TPP-21181), SEQ ID NO:584 (TPP-21183), SEQ ID NO:602 (21360), or SEQ ID NO:620 (TPP-23411), SEQ ID NO:663 (TPP-29596), SEQ ID NO:683 (TPP-29597), SEQ ID NO:705 (TPP-18429), SEQ ID NO:725 (TPP-18430), SEQ ID NO:745 (TPP-18432), SEQ ID NO:765 (TPP-18433), SEQ ID NO:785 (TPP-18436), SEQ ID NO:805 (TPP-19571), SEQ ID NO:829 (TPP-27477), SEQ ID NO:849 (TPP-27478), SEQ ID NO:869 (TPP-27479), SEQ ID NO:889 (TPP-27480), SEQ ID NO:909 (TPP-29367), SEQ ID NO:929 (TPP-29368), or SEQ ID NO:949 (TPP-29369).

[1115] According to some preferred embodiments, the isolated anti-CCR8 antibody or antigen-binding fragment thereof comprises at least one, two, and preferably three, four, five or six CDR sequences according to
[1116] a) SEQ ID NO:258, SEQ ID NO:259, SEQ ID NO:260, SEQ ID NO:262, SEQ ID NO:263 and SEQ ID NO:264 (TPP-16966),
[1117] b) SEQ ID NO:276, SEQ ID NO:277, SEQ ID NO:278, SEQ ID NO:280, SEQ ID NO:281 and SEQ ID NO:282 (TPP-17575),
[1118] c) SEQ ID NO:294, SEQ ID NO:295, SEQ ID NO:296, SEQ ID NO:298, SEQ ID NO:299 and SEQ ID NO:300 (TPP-17576),
[1119] d) SEQ ID NO:312, SEQ ID NO:313, SEQ ID NO:314, SEQ ID NO:316, SEQ ID NO:317 and SEQ ID NO:318 (TPP-17577),
[1120] e) SEQ ID NO:330, SEQ ID NO:331, SEQ ID NO:332, SEQ ID NO:334, SEQ ID NO:335 and SEQ ID NO:336 (TPP-17578),
[1121] f) SEQ ID NO:348, SEQ ID NO:349, SEQ ID NO:350, SEQ ID NO:352, SEQ ID NO:353 and SEQ ID NO:354 (TPP-17579),
[1122] g) SEQ ID NO:366, SEQ ID NO:367, SEQ ID NO:368, SEQ ID NO:370, SEQ ID NO:371 and SEQ ID NO:372 (TPP-17580),
[1123] h) SEQ ID NO:384, SEQ ID NO:385, SEQ ID NO:386, SEQ ID NO:388, SEQ ID NO:389 and SEQ ID NO:390 (TPP-17581),
[1124] i) SEQ ID NO:402, SEQ ID NO:403, SEQ ID NO:404, SEQ ID NO:406, SEQ ID NO:407 and SEQ ID NO:408 (TPP-18205),
[1125] j) SEQ ID NO:420, SEQ ID NO:421, SEQ ID NO:422, SEQ ID NO:424, SEQ ID NO:425 and SEQ ID NO:426 (TPP-18206),
[1126] k) SEQ ID NO:438, SEQ ID NO:439, SEQ ID NO:440, SEQ ID NO:442, SEQ ID NO:443 and SEQ ID NO:444 (TPP-18207),
[1127] l) SEQ ID NO:456, SEQ ID NO:457, SEQ ID NO:458, SEQ ID NO:460, SEQ ID NO:461 and SEQ ID NO:462 (TPP-19546),
[1128] m) SEQ ID NO:474, SEQ ID NO:475, SEQ ID NO:476, SEQ ID NO:478, SEQ ID NO:479 and SEQ ID NO:480 (TPP-20950),
[1129] n) SEQ ID NO:492, SEQ ID NO:493, SEQ ID NO:494, SEQ ID NO:496, SEQ ID NO:497 and SEQ ID NO:498 (TPP-20955),
[1130] o) SEQ ID NO:510, SEQ ID NO:511, SEQ ID NO:512, SEQ ID NO:514, SEQ ID NO:515, and SEQ ID NO:516 (TPP-20965),
[1131] p) SEQ ID NO:528, SEQ ID NO:529, SEQ ID NO:530, SEQ ID NO:532, SEQ ID NO:533 and SEQ ID NO:534 (TPP-21045),
[1132] q) SEQ ID NO:546, SEQ ID NO:547, SEQ ID NO:548, SEQ ID NO:550, SEQ ID NO:551 and SEQ ID NO:552 (TPP-21047),
[1133] r) SEQ ID NO:564, SEQ ID NO:565, SEQ ID NO:566, SEQ ID NO:568, SEQ ID NO:569 and SEQ ID NO:570 (TPP-21181),
[1134] s) SEQ ID NO:582, SEQ ID NO:583, SEQ ID NO:584, SEQ ID NO:586, SEQ ID NO:587 and SEQ ID NO:588 (TPP-21183),
[1135] t) SEQ ID NO:600, SEQ ID NO:601, SEQ ID NO:602, SEQ ID NO:604, SEQ ID NO:605 or SEQ ID NO:606 (TPP-21360),
[1136] u) SEQ ID NO:618, SEQ ID NO:619, SEQ ID NO:620, SEQ ID NO:622, SEQ ID NO:623 or SEQ ID NO:624 (TPP-23411),
[1137] v) SEQ ID NO:661, SEQ ID NO:662, SEQ ID NO:663, SEQ ID NO:665, SEQ ID NO:666 or SEQ ID NO:667 (TPP-29596),
[1138] w) SEQ ID NO:681, SEQ ID NO:682, SEQ ID NO:683, SEQ ID NO:685, SEQ ID NO:686 or SEQ ID NO:687 (TPP-29597),
[1139] x) SEQ ID NO:703, SEQ ID NO:704, SEQ ID NO:705, SEQ ID NO:707, SEQ ID NO:708 or SEQ ID NO:709 (TPP-18429),
[1140] y) SEQ ID NO:723, SEQ ID NO:724, SEQ ID NO:725, SEQ ID NO:727, SEQ ID NO:728 or SEQ ID NO:729 (TPP-18430),
[1141] z) SEQ ID NO:743, SEQ ID NO:744, SEQ ID NO:745, SEQ ID NO:747, SEQ ID NO:748 or SEQ ID NO:749 (TPP-18432),
[1142] aa) SEQ ID NO:763, SEQ ID NO:764, SEQ ID NO:765, SEQ ID NO:767, SEQ ID NO:768 or SEQ ID NO:769 (TPP-18433),
[1143] bb) SEQ ID NO:783, SEQ ID NO:784, SEQ ID NO:785, SEQ ID NO:787, SEQ ID NO:788 or SEQ ID NO:789 (TPP-18436),
[1144] cc) SEQ ID NO:803, SEQ ID NO:804, SEQ ID NO:805, SEQ ID NO:807, SEQ ID NO:808 or SEQ ID NO:809 (TPP-19571),
[1145] dd) SEQ ID NO:827, SEQ ID NO: 828, SEQ ID NO: 829, SEQ ID NO: 831, SEQ ID NO:832 or SEQ ID NO:833 (TPP-27477),
[1146] ee) SEQ ID NO:847, SEQ ID NO: 848, SEQ ID NO: 849, SEQ ID NO: 851, SEQ ID NO:852 or SEQ ID NO:853 (TPP-27478),
[1147] ff) SEQ ID NO:867, SEQ ID NO: 868, SEQ ID NO: 869, SEQ ID NO: 871, SEQ ID NO:872 or SEQ ID NO:873 (TPP-27479),
[1148] gg) SEQ ID NO:887, SEQ ID NO: 888, SEQ ID NO: 889, SEQ ID NO: 891, SEQ ID NO:892 or SEQ ID NO:893 (TPP-27480),
[1149] hh) SEQ ID NO:907, SEQ ID NO: 908, SEQ ID NO: 909, SEQ ID NO: 911, SEQ ID NO:912 or SEQ ID NO:913 (TPP-29367),
[1150] ii) SEQ ID NO:927, SEQ ID NO: 928, SEQ ID NO: 929, SEQ ID NO: 931, SEQ ID NO:932 or SEQ ID NO:933 (TPP-29368), and/or
[1151] jj) SEQ ID NO:947, SEQ ID NO: 948, SEQ ID NO: 949, SEQ ID NO: 951, SEQ ID NO:952 or SEQ ID NO:953 (TPP-29369),
   optionally wherein up to one, two, three, four or five mutations have been introduced into at least one CDR. Preferably, the HCDR3 comprises or has been engineered to comprise at least one or more histidine residues as described elsewhere herein.

[1152] For example, tyrosine may be exchanged with a positively charged amino acid such as histidine and vice versa. For example, a positively charged amino acid may be exchanged with a different positively charged amino acid, a negatively charged amino acid may be exchanged with a different negatively charged amino acid, a polar amino acid may be exchanged with a different polar amino acid, a polar uncharged amino acid may be exchanged with a different polar uncharged amino acid, a small amino acid may be exchanged with a different small amino acid, an amphiphatic amino acid may be exchanged with a different amphiphatic amino acid, an aromatic amino acid may be exchanged with a different aromatic amino acid. As understood by the skilled person, in particular those amino acid exchanges are possible, which are not altering the specific interaction between the antibody and the sulfated TRD of CCR8.

[1153] According to some preferred embodiments, the isolated anti-CCR8 antibody or antigen-binding fragment thereof comprises a variable heavy chain sequence and/or a variable light chain sequence having at least 90%, 95%, 98% or 100% sequence identity with
[1154] a) a variable heavy chain sequence according to SEQ ID NO:257 and/or a variable light chain sequence according to SEQ ID NO:261 (TPP-16966),
[1155] b) a variable heavy chain sequence according to SEQ ID NO:275 and/or a variable light chain sequence according to SEQ ID NO:279 (TPP-17575),
[1156] c) a variable heavy chain sequence according to SEQ ID NO:293 and/or a variable light chain sequence according to SEQ ID NO:297 (TPP-17576),
[1157] d) a variable heavy chain sequence according to SEQ ID NO:311 and/or a variable light chain sequence according to SEQ ID NO:315 (TPP-17577),
[1158] e) a variable heavy chain sequence according to SEQ ID NO:329 and/or a variable light chain sequence according to SEQ ID NO:333 (TPP-17578),
[1159] f) a variable heavy chain sequence according to SEQ ID NO:347 and/or a variable light chain sequence according to SEQ ID NO:351 (TPP-17579),
[1160] g) a variable heavy chain sequence according to SEQ ID NO:365 and/or a variable light chain sequence according to SEQ ID NO:369 (TPP-17580),
[1161] h) a variable heavy chain sequence according to SEQ ID NO:383 and/or a variable light chain sequence according to SEQ ID NO:387 (TPP-17581),
[1162] i) a variable heavy chain sequence according to SEQ ID NO:401 and/or a variable light chain sequence according to SEQ ID NO:405 (TPP-18205),
[1163] j) a variable heavy chain sequence according to SEQ ID NO:419 and/or a variable light chain sequence according to SEQ ID NO:423 (TPP-18206),
[1164] k) a variable heavy chain sequence according to SEQ ID NO:437 and/or a variable light chain sequence according to SEQ ID NO:441 (TPP-18207),
[1165] l) a variable heavy chain sequence according to SEQ ID NO:455 and/or a variable light chain sequence according to SEQ ID NO:459 (TPP-19546),
[1166] m) a variable heavy chain sequence according to SEQ ID NO:473 and/or a variable light chain sequence according to SEQ ID NO:477 (TPP-20950),
[1167] n) a variable heavy chain sequence according to SEQ ID NO:491 and/or a variable light chain sequence according to SEQ ID NO:495 (TPP-20955),
[1168] o) a variable heavy chain sequence according to SEQ ID NO:509 and/or a variable light chain sequence according to SEQ ID NO:513 (TPP-20965),
[1169] p) a variable heavy chain sequence according to SEQ ID NO:527 and/or a variable light chain sequence according to SEQ ID NO:531 (TPP-21045),
[1170] q) a variable heavy chain sequence according to SEQ ID NO:545 and/or a variable light chain sequence according to SEQ ID NO:549 (TPP-21047),
[1171] r) a variable heavy chain sequence according to SEQ ID NO:563 and/or a variable light chain sequence according to SEQ ID NO:567 (TPP-21181),
[1172] s) a variable heavy chain sequence according to SEQ ID NO:581 and/or a variable light chain sequence according to SEQ ID NO:585 (TPP-21183),
[1173] t) a variable heavy chain sequence according to SEQ ID NO:599 and/or a variable light chain sequence according to SEQ ID NO:603 (TPP-21360),
[1174] u) a variable heavy chain sequence according to SEQ ID NO:617 and/or a variable light chain sequence according to SEQ ID NO:621 (TPP-23411),
[1175] v) a variable heavy chain sequence according to SEQ ID NO:660 and/or a variable light chain sequence according to SEQ ID NO:664 (TPP-29596),
[1176] w) a variable heavy chain sequence according to SEQ ID NO:680 and/or a variable light chain sequence according to SEQ ID NO:684 (TPP-29597),
[1177] x) a variable heavy chain sequence according to SEQ ID NO:702 and/or a variable light chain sequence according to SEQ ID NO:706 (TPP-18429),
[1178] y) a variable heavy chain sequence according to SEQ ID NO:722 and/or a variable light chain sequence according to SEQ ID NO:726 (TPP-18430),
[1179] z) a variable heavy chain sequence according to SEQ ID NO:742 and/or a variable light chain sequence according to SEQ ID NO:746 (TPP-18432),
[1180] aa) a variable heavy chain sequence according to SEQ ID NO:762 and/or a variable light chain sequence according to SEQ ID NO:766 (TPP-18433),
[1181] bb) a variable heavy chain sequence according to SEQ ID NO:782 and/or a variable light chain sequence according to SEQ ID NO:786 (TPP-18436),
[1182] cc) a variable heavy chain sequence according to SEQ ID NO:802 and/or a variable light chain sequence according to SEQ ID NO:806 (TPP-19571),
[1183] dd) a variable heavy chain sequence according to SEQ ID NO:826 and/or a variable light chain sequence according to SEQ ID NO:830 (TPP-27477),
[1184] ee) a variable heavy chain sequence according to SEQ ID NO:846 and/or a variable light chain sequence according to SEQ ID NO:850 (TPP-27478),
[1185] ff) a variable heavy chain sequence according to SEQ ID NO:866 and/or a variable light chain sequence according to SEQ ID NO:870 (TPP-27479),
[1186] gg) a variable heavy chain sequence according to SEQ ID NO:886 and/or a variable light chain sequence according to SEQ ID NO:890 (TPP-27480),
[1187] hh) a variable heavy chain sequence according to SEQ ID NO:906 and/or a variable light chain sequence according to SEQ ID NO:910 (TPP-29367),
[1188] ii) a variable heavy chain sequence according to SEQ ID NO:926 and/or a variable light chain sequence according to SEQ ID NO:930 (TPP-29368), or
[1189] jj) a variable heavy chain sequence according to SEQ ID NO:946 and/or a variable light chain sequence according to SEQ ID NO:950 (TPP-29369).

[1190] According to some preferred embodiments, the isolated anti-CCR8 antibody or antigen-binding fragment thereof comprises
[1191] a) a variable heavy chain sequence according to SEQ ID NO:257 and/or a variable light chain sequence according to SEQ ID NO:261 (TPP-16966),
[1192] b) a variable heavy chain sequence according to SEQ ID NO:275 and/or a variable light chain sequence according to SEQ ID NO:279 (TPP-17575),
[1193] c) a variable heavy chain sequence according to SEQ ID NO:293 and/or a variable light chain sequence according to SEQ ID NO:297 (TPP-17576),
[1194] d) a variable heavy chain sequence according to SEQ ID NO:311 and/or a variable light chain sequence according to SEQ ID NO:315 (TPP-17577),
[1195] e) a variable heavy chain sequence according to SEQ ID NO:329 and/or a variable light chain sequence according to SEQ ID NO:333 (TPP-17578),
[1196] f) a variable heavy chain sequence according to SEQ ID NO:347 and/or a variable light chain sequence according to SEQ ID NO:351 (TPP-17579),
[1197] g) a variable heavy chain sequence according to SEQ ID NO:365 and/or a variable light chain sequence according to SEQ ID NO:369 (TPP-17580),
[1198] h) a variable heavy chain sequence according to SEQ ID NO:383 and/or a variable light chain sequence according to SEQ ID NO:387 (TPP-17581),
[1199] i) a variable heavy chain sequence according to SEQ ID NO:401 and/or a variable light chain sequence according to SEQ ID NO:405 (TPP-18205),
[1200] j) a variable heavy chain sequence according to SEQ ID NO:419 and/or a variable light chain sequence according to SEQ ID NO:423 (TPP-18206),
[1201] k) a variable heavy chain sequence according to SEQ ID NO:437 and/or a variable light chain sequence according to SEQ ID NO:441 (TPP-18207),
[1202] l) a variable heavy chain sequence according to SEQ ID NO:455 and/or a variable light chain sequence according to SEQ ID NO:459 (TPP-19546),
[1203] m) a variable heavy chain sequence according to SEQ ID NO:473 and/or a variable light chain sequence according to SEQ ID NO:477 (TPP-20950),
[1204] n) a variable heavy chain sequence according to SEQ ID NO:491 and/or a variable light chain sequence according to SEQ ID NO:495 (TPP-20955),
[1205] o) a variable heavy chain sequence according to SEQ ID NO:509 and/or a variable light chain sequence according to SEQ ID NO:513 (TPP-20965),
[1206] p) a variable heavy chain sequence according to SEQ ID NO:527 and/or a variable light chain sequence according to SEQ ID NO:531 (TPP-21045),
[1207] q) a variable heavy chain sequence according to SEQ ID NO:545 and/or a variable light chain sequence according to SEQ ID NO:549 (TPP-21047),
[1208] r) a variable heavy chain sequence according to SEQ ID NO:563 and/or a variable light chain sequence according to SEQ ID NO:567 (TPP-21181),
[1209] s) a variable heavy chain sequence according to SEQ ID NO:581 and/or a variable light chain sequence according to SEQ ID NO:585 (TPP-21183),
[1210] t) a variable heavy chain sequence according to SEQ ID NO:599 and/or a variable light chain sequence according to SEQ ID NO:603 (TPP-21360),
[1211] u) a variable heavy chain sequence according to SEQ ID NO:617 and/or a variable light chain sequence according to SEQ ID NO:621 (TPP-23411),
[1212] v) a variable heavy chain sequence according to SEQ ID NO:660 and/or a variable light chain sequence according to SEQ ID NO:664 (TPP-29596),
[1213] w) a variable heavy chain sequence according to SEQ ID NO:680 and/or a variable light chain sequence according to SEQ ID NO:684 (TPP-29597),
[1214] x) a variable heavy chain sequence according to SEQ ID NO:702 and/or a variable light chain sequence according to SEQ ID NO:706 (TPP-18429),
[1215] y) a variable heavy chain sequence according to SEQ ID NO:722 and/or a variable light chain sequence according to SEQ ID NO:726 (TPP-18430),
[1216] z) a variable heavy chain sequence according to SEQ ID NO:742 and/or a variable light chain sequence according to SEQ ID NO:746 (TPP-18432),
[1217] aa) a variable heavy chain sequence according to SEQ ID NO:762 and/or a variable light chain sequence according to SEQ ID NO:766 (TPP-18433),
[1218] bb) a variable heavy chain sequence according to SEQ ID NO:782 and/or a variable light chain sequence according to SEQ ID NO:786 (TPP-18436),
[1219] cc) a variable heavy chain sequence according to SEQ ID NO:802 and/or a variable light chain sequence according to SEQ ID NO:806 (TPP-19571),
[1220] dd) a variable heavy chain sequence according to SEQ ID NO:826 and/or a variable light chain sequence according to SEQ ID NO:830 (TPP-27477),
[1221] ee) a variable heavy chain sequence according to SEQ ID NO:846 and/or a variable light chain sequence according to SEQ ID NO:850 (TPP-27478),
[1222] ff) a variable heavy chain sequence according to SEQ ID NO:866 and/or a variable light chain sequence according to SEQ ID NO:870 (TPP-27479),
[1223] gg) a variable heavy chain sequence according to SEQ ID NO:886 and/or a variable light chain sequence according to SEQ ID NO:890 (TPP-27480),
[1224] hh) a variable heavy chain sequence according to SEQ ID NO:906 and/or a variable light chain sequence according to SEQ ID NO:910 (TPP-29367),
[1225] ii) a variable heavy chain sequence according to SEQ ID NO:926 and/or a variable light chain sequence according to SEQ ID NO:930 (TPP-29368), or
[1226] jj) a variable heavy chain sequence according to SEQ ID NO:946 and/or a variable light chain sequence according to SEQ ID NO:950 (TPP-29369).

[1227] According to some preferred embodiments, the isolated anti-CCR8 antibody or antigen-binding fragment thereof comprises a heavy chain sequence and/or a light chain sequence having at least 90%, 95%, 98% or 100% sequence identity with
[1228] a) a heavy chain according to SEQ ID NO:273 and a light chain according to SEQ ID NO:274 (TPP-16966),
[1229] b) a heavy chain according to SEQ ID NO:291 and a light chain according to SEQ ID NO:292 (TPP-17575),
[1230] c) a heavy chain according to SEQ ID NO:309 and a light chain according to SEQ ID NO:310 (TPP-17576),
[1231] d) a heavy chain according to SEQ ID NO:327 and a light chain according to SEQ ID NO:328 (TPP-17577),
[1232] e) a heavy chain according to SEQ ID NO:345 and a light chain according to SEQ ID NO:346 (TPP-17578),
[1233] f) a heavy chain according to SEQ ID NO:363 and a light chain according to SEQ ID NO:364 (TPP-17579),
[1234] g) a heavy chain according to SEQ ID NO:381 and a light chain according to SEQ ID NO:382 (TPP-17580),
[1235] h) a heavy chain according to SEQ ID NO:399 and a light chain according to SEQ ID NO:400 (TPP-17581),
[1236] i) a heavy chain according to SEQ ID NO:417 and a light chain according to SEQ ID NO:418 (TPP-18205),
[1237] j) a heavy chain according to SEQ ID NO:435 and a light chain according to SEQ ID NO:436 (TPP-18206),
[1238] k) a heavy chain according to SEQ ID NO:453 and a light chain according to SEQ ID NO:454 (TPP-18207),
[1239] l) a heavy chain according to SEQ ID NO:471 and a light chain according to SEQ ID NO:472 (TPP-19546),
[1240] m) a heavy chain according to SEQ ID NO:489 and a light chain according to SEQ ID NO:490 (TPP-20950),
[1241] n) a heavy chain according to SEQ ID NO:507 and a light chain according to SEQ ID NO:508 (TPP-20955),
[1242] o) a heavy chain according to SEQ ID NO:525 and a light chain according to SEQ ID NO:526 (TPP-20965),
[1243] p) a heavy chain according to SEQ ID NO:543 and a light chain according to SEQ ID NO:544 (TPP-21045),
[1244] q) a heavy chain according to SEQ ID NO:561 and a light chain according to SEQ ID NO:562 (TPP-21047),
[1245] r) a heavy chain according to SEQ ID NO:579 and a light chain according to SEQ ID NO:580 (TPP-21181),
[1246] s) a heavy chain according to SEQ ID NO:597 and a light chain according to SEQ ID NO:598 (TPP-21183),
[1247] t) a heavy chain according to SEQ ID NO:615 and a light chain according to SEQ ID NO:616 (TPP-21360),
[1248] u) a heavy chain according to SEQ ID NO:633 and a light chain according to SEQ ID NO:634 (TPP-23411),
[1249] v) a heavy chain according to SEQ ID NO:676 and a light chain according to SEQ ID NO:677 (TPP-29596),
[1250] w) a heavy chain according to SEQ ID NO:696 and a light chain according to SEQ ID NO:697 (TPP-29597),
[1251] x) a heavy chain according to SEQ ID NO:718 and a light chain according to SEQ ID NO:719 (TPP-18429),
[1252] y) a heavy chain according to SEQ ID NO:738 and a light chain according to SEQ ID NO:739 (TPP-18430),
[1253] z) a heavy chain according to SEQ ID NO:758 and a light chain according to SEQ ID NO:759 (TPP-18432),
[1254] aa) a heavy chain according to SEQ ID NO:778 and a light chain according to SEQ ID NO:779 (TPP-18433),
[1255] bb) a heavy chain according to SEQ ID NO:798 and a light chain according to SEQ ID NO:799 (TPP-18436),
[1256] cc) a heavy chain according to SEQ ID NO:818 and a light chain according to SEQ ID NO:819 (TPP-19571),
[1257] dd) a heavy chain according to SEQ ID NO:842 and a light chain according to SEQ ID NO:843 (TPP-27477),
[1258] ee) a heavy chain according to SEQ ID NO:862 and a light chain according to SEQ ID NO:863 (TPP-27478),
[1259] ff) a heavy chain according to SEQ ID NO:882 and a light chain according to SEQ ID NO:883 (TPP-27479),
[1260] gg) a heavy chain according to SEQ ID NO:902 and a light chain according to SEQ ID NO:903 (TPP-27480),
[1261] hh) a heavy chain according to SEQ ID NO:922 and a light chain according to SEQ ID NO:923 (TPP-29367),
[1262] ii) a heavy chain according to SEQ ID NO:942 and a light chain according to SEQ ID NO:943 (TPP-29368), or
[1263] jj) a heavy chain according to SEQ ID NO:962 and a light chain according to SEQ ID NO:963 (TPP-29369).

[1264] According to some preferred embodiments, the isolated anti-CCR8 antibody or antigen-binding fragment thereof comprises
[1265] a) a heavy chain according to SEQ ID NO:273 and a light chain according to SEQ ID NO:274 (TPP-16966),
[1266] b) a heavy chain according to SEQ ID NO:291 and a light chain according to SEQ ID NO:292 (TPP-17575),
[1267] c) a heavy chain according to SEQ ID NO:309 and a light chain according to SEQ ID NO:310 (TPP-17576),
[1268] d) a heavy chain according to SEQ ID NO:327 and a light chain according to SEQ ID NO:328 (TPP-17577),
[1269] e) a heavy chain according to SEQ ID NO:345 and a light chain according to SEQ ID NO:346 (TPP-17578),
[1270] f) a heavy chain according to SEQ ID NO:363 and a light chain according to SEQ ID NO:364 (TPP-17579),
[1271] g) a heavy chain according to SEQ ID NO:381 and a light chain according to SEQ ID NO:382 (TPP-17580),
[1272] h) a heavy chain according to SEQ ID NO:399 and a light chain according to SEQ ID NO:400 (TPP-17581),
[1273] i) a heavy chain according to SEQ ID NO:417 and a light chain according to SEQ ID NO:418 (TPP-18205),
[1274] j) a heavy chain according to SEQ ID NO:435 and a light chain according to SEQ ID NO:436 (TPP-18206),
[1275] k) a heavy chain according to SEQ ID NO:453 and a light chain according to SEQ ID NO:454 (TPP-18207),
[1276] l) a heavy chain according to SEQ ID NO:471 and a light chain according to SEQ ID NO:472 (TPP-19546),
[1277] m) a heavy chain according to SEQ ID NO:489 and a light chain according to SEQ ID NO:490 (TPP-20950),
[1278] n) a heavy chain according to SEQ ID NO:507 and a light chain according to SEQ ID NO:508 (TPP-20955),
[1279] o) a heavy chain according to SEQ ID NO:525 and a light chain according to SEQ ID NO:526 (TPP-20965),
[1280] p) a heavy chain according to SEQ ID NO:543 and a light chain according to SEQ ID NO:544 (TPP-21045),
[1281] q) a heavy chain according to SEQ ID NO:561 and a light chain according to SEQ ID NO:562 (TPP-21047),
[1282] r) a heavy chain according to SEQ ID NO:579 and a light chain according to SEQ ID NO:580 (TPP-21181),
[1283] s) a heavy chain according to SEQ ID NO:597 and a light chain according to SEQ ID NO:598 (TPP-21183),
[1284] t) a heavy chain according to SEQ ID NO:615 and a light chain according to SEQ ID NO:616 (TPP-21360),
[1285] u) a heavy chain according to SEQ ID NO:633 and a light chain according to SEQ ID NO:634 (TPP-23411),
[1286] v) a heavy chain according to SEQ ID NO:676 and a light chain according to SEQ ID NO:677 (TPP-29596),
[1287] w) a heavy chain according to SEQ ID NO:696 and a light chain according to SEQ ID NO:697 (TPP-29597),
[1288] x) a heavy chain according to SEQ ID NO:718 and a light chain according to SEQ ID NO:719 (TPP-18429),
[1289] y) a heavy chain according to SEQ ID NO:738 and a light chain according to SEQ ID NO:739 (TPP-18430),
[1290] z) a heavy chain according to SEQ ID NO:758 and a light chain according to SEQ ID NO:759 (TPP-18432),
[1291] aa) a heavy chain according to SEQ ID NO:778 and a light chain according to SEQ ID NO:779 (TPP-18433),
[1292] bb) a heavy chain according to SEQ ID NO:798 and a light chain according to SEQ ID NO:799 (TPP-18436),
[1293] cc) a heavy chain according to SEQ ID NO:818 and a light chain according to SEQ ID NO:819 (TPP-19571),
[1294] dd) a heavy chain according to SEQ ID NO:842 and a light chain according to SEQ ID NO:843 (TPP-27477),
[1295] ee) a heavy chain according to SEQ ID NO:862 and a light chain according to SEQ ID NO:863 (TPP-27478),
[1296] ff) a heavy chain according to SEQ ID NO:882 and a light chain according to SEQ ID NO:883 (TPP-27479),
[1297] gg) a heavy chain according to SEQ ID NO:902 and a light chain according to SEQ ID NO:903 (TPP-27480),
[1298] hh) a heavy chain according to SEQ ID NO:922 and a light chain according to SEQ ID NO:923 (TPP-29367),
[1299] ii) a heavy chain according to SEQ ID NO:942 and a light chain according to SEQ ID NO:943 (TPP-29368), or
[1300] jj) a heavy chain according to SEQ ID NO:962 and a light chain according to SEQ ID NO:963 (TPP-29369).

[1301] Also provided according to the current aspect are various antibodies comprising random permutations of the CDRs of the anti-CCR8 antibodies provided with the sequence listings.

[1302] Preferably, the antibody or antigen-binding fragment according to the current aspect is afucosylated, as described elsewhere herein. Preferably, the antibody or antigen-binding fragment according to the current aspect induces ADCC and/or ADCP, as described elsewhere herein. Preferably, the antibody or antigen-binding fragment according to the current aspect is a non-internalizing or low-internalizing antibody, as described elsewhere herein.

### Aspect 18—Anti-Murine CCR8 Antibody (Seq Defined)

[1303] According to an 18^{th} aspect, which may be or may not be the same as the 6^{th}, 7^{th}, 8^{th}, 9^{th}, 10^{th}, 11^{th}, 12^{th}, 13^{th}, 14^{th}, 15^{th} and/or 16^{th} aspect, there is provided an isolated anti-CCR8 antibody or antigen-binding fragment thereof. Preferably, the antibodies according to the current aspect bind to murine CCR8, in particular to an isolated polypeptide according to SEQ ID NO:45 and/or SEQ ID NO:48, wherein at least two or all of Y3, Y14 and Y15 have been sulfated. The CDRs of the antibodies according to the current aspect are preferably human derived CDRs. Furthermore, the antibodies are characterized by properties making them particularly suitable for therapy, e.g. are antibodies according to at least one or more of aspects 7, 8, 9, 10, 11, 12, 13, 14, 15 or 16. In summary, the antibodies according to the current aspect can be used as surrogate antibodies recognizing murine CCR8 and have superior therapeutic properties as discussed e.g. in example 12.

[1304] According to some preferred embodiments, the isolated anti-CCR8 antibody or antigen-binding fragment thereof comprises at least one, two, three, four, five or six CDR sequence(s) having at least 90%, 95%, 98% or 100% sequence identity with any of
[1305] a) SEQ ID NO:202, SEQ ID NO:203, SEQ ID NO:204, SEQ ID NO:206, SEQ ID NO:207 and SEQ ID NO:208 (TPP-14095),
[1306] b) SEQ ID NO:216, SEQ ID NO:217, SEQ ID NO:218, SEQ ID NO:220, SEQ ID NO:221 or SEQ ID NO:222 (TPP-14099),
[1307] c) SEQ ID NO:230, SEQ ID NO:231, SEQ ID NO:232, SEQ ID NO:234, SEQ ID NO:235 and SEQ ID NO:236 (TPP-15285), or
[1308] d) SEQ ID NO:244, SEQ ID NO:245, SEQ ID NO:246, SEQ ID NO:248, SEQ ID NO:249 and SEQ ID NO:250 (TPP-15286).

[1309] According to some preferred embodiments, the isolated anti-CCR8 antibody or antigen-binding fragment thereof comprises a HCDR3 sequence having at least 90%, 95%, 98% or 100% sequence identity with any of SEQ ID NO:204, SEQ ID NO:218, SEQ ID NO:232, or SEQ ID NO:246.

[1310] According to some preferred embodiments, the isolated anti-CCR8 antibody or antigen-binding fragment thereof comprises at least one, two, and preferably three, four, five or six CDR sequences according to
[1311] a) SEQ ID NO:202, SEQ ID NO:203, SEQ ID NO:204, SEQ ID NO:206, SEQ ID NO:207 and SEQ ID NO:208 (TPP-14095),
[1312] b) SEQ ID NO:216, SEQ ID NO:217, SEQ ID NO:218, SEQ ID NO:220, SEQ ID NO:221 or SEQ ID NO:222 (TPP-14099),
[1313] c) SEQ ID NO:230, SEQ ID NO:231, SEQ ID NO:232, SEQ ID NO:234, SEQ ID NO:235 and SEQ ID NO:236 (TPP-15285), or
[1314] d) SEQ ID NO:244, SEQ ID NO:245, SEQ ID NO:246, SEQ ID NO:248, SEQ ID NO:249 and SEQ ID NO:250 (TPP-15286),
   optionally wherein up to one, two, three, four or five mutations have been introduced into at least one CDR.

[1315] For example, tyrosine may be exchanged with a positively charged amino acid such as histidine and vice versa. For example, a positively charged amino acid may be exchanged with a different positively charged amino acid, a negatively charged amino acid may be exchanged with a different negatively charged amino acid, a polar amino acid may be exchanged with a different polar amino acid, a polar uncharged amino acid may be exchanged with a different polar uncharged amino acid, a small amino acid may be exchanged with a different small amino acid, an amphiphatic amino acid may be exchanged with a different amphiphatic amino acid, an aromatic amino acid may be exchanged with a different aromatic amino acid. As understood by the skilled person, in particular those amino acid exchanges are possible, which are not altering the specific interaction between the antibody and the sulfated TRD of CCR8. Amino acid exchanges introducing histidine are preferred.

[1316] According to some preferred embodiments, the isolated anti-CCR8 antibody or antigen-binding fragment thereof comprises a variable heavy chain sequence and/or a variable light chain sequence having at least 90%, 95%, 98% or 100% sequence identity with
[1317] a) a variable heavy chain sequence according to SEQ ID NO:201 and a variable light chain sequence according to SEQ ID NO:205 (TPP-14095),
[1318] b) a variable heavy chain sequence according to SEQ ID NO:215 and a variable light chain sequence according to SEQ ID NO:219 (TPP-14099),
[1319] c) a variable heavy chain sequence according to SEQ ID NO:229 and a variable light chain sequence according to SEQ ID NO:233 (TPP-15285), or
[1320] d) a variable heavy chain sequence according to SEQ ID NO:243 and a variable light chain sequence according to SEQ ID NO:247 (TPP-15286).

[1321] According to some preferred embodiments, the anti-CCR8 antibody or antigen-binding fragment thereof comprises
[1322] e) a variable heavy chain sequence according to SEQ ID NO:201 and a variable light chain sequence according to SEQ ID NO:205 (TPP-14095),
[1323] f) a variable heavy chain sequence according to SEQ ID NO:215 and a variable light chain sequence according to SEQ ID NO:219 (TPP-14099),
[1324] g) a variable heavy chain sequence according to SEQ ID NO:229 and a variable light chain sequence according to SEQ ID NO:233 (TPP-15285), or
[1325] h) a variable heavy chain sequence according to SEQ ID NO:243 and a variable light chain sequence according to SEQ ID NO:247 (TPP-15286).

[1326] According to some preferred embodiments, the isolated anti-CCR8 antibody or antigen-binding fragment thereof comprises a heavy chain sequence and/or a light chain sequence having at least 90%, 95%, 98% or 100% sequence identity with
[1327] a) a heavy chain according to SEQ ID NO:211 and/or a light chain according to SEQ ID NO:212 (TPP-14095),
[1328] b) a heavy chain according to SEQ ID NO:225 and/or a light chain according to SEQ ID NO:226 (TPP-14099),
[1329] c) a heavy chain according to SEQ ID NO:239 and/or a light chain according to SEQ ID NO:240 (TPP-15285), or
[1330] d) a heavy chain according to SEQ ID NO:253 and/or a light chain according to SEQ ID NO:254 (TPP-15286).

[1331] According to some preferred embodiments, the isolated anti-CCR8 antibody or antigen-binding fragment thereof comprises
[1332] a) a heavy chain according to SEQ ID NO:211 and/or a light chain according to SEQ ID NO:212 (TPP-14095),
[1333] b) a heavy chain according to SEQ ID NO:225 and/or a light chain according to SEQ ID NO:226 (TPP-14099),
[1334] c) a heavy chain according to SEQ ID NO:239 and/or a light chain according to SEQ ID NO:240 (TPP-15285), or
[1335] d) a heavy chain according to SEQ ID NO:253 and/or a light chain according to SEQ ID NO:254 (TPP-15286).

### Preferred Combinations According to “all Aspects”

[1336] The following embodiments are particularly preferred embodiments of aspects 6, 7, 8, 9, 10, 11, 12, 13, 14, 15, 16, 17 and 18 (“all aspects” according to this section).

[1337] In preferred embodiments of all aspects, the antibody or antigen-binding fragment the isolated antibody or antigen-binding fragment thereof specifically binds to the sulfated tyrosine rich domain of CCR8. In preferred embodiments of all aspects, the antibody or antigen-binding fragment is characterized by a HCDR3 region comprising between 10 and 34% of tyrosine and/or between 2 and 20% of histidine. In preferred embodiments of all aspects, the antibody or antigen-binding fragment is non-internalizing or is characterized by an internalization into a cell with endogenous target expression which is lower than the 1.5, 2, 3, 4, 5, 6, 7, or 10-fold of the internalization of the isotype control.

[1338] In preferred embodiments of all aspects, the antibody or antigen-binding fragment comprises human (derived) CDRs. For example, the antibody can be a human anti-human CCR8 antibody. In preferred embodiments of all aspects, the antibody or antigen-binding fragment is cross reactive for CCR8 from at least two species, preferably selected from human, monkey, Macaca fascicularis (cynomolgus monkey), Macaca mulatta (rhesus macaque), rodent, mouse, rat, horse, bovine, pig, dog, cat and camel, even more preferably selected from human, cynomolgus and mouse. According to some most preferred of these embodiments, the antibody or antigen-binding fragment is cross reactive for human and cynomolgus CCR8.

[1339] In preferred embodiments of all aspects, the antibody or antigen-binding fragment binds the CCR8 from a first species with a first dissociation constant KD and binds the CCR8 from a second species with a second dissociation constant KD, wherein the first and the second dissociation constant are in the same order of magnitude.

[1340] In preferred embodiments of all aspects the antibody or antigen-binding fragment binds with a KD value of <5E-8 M, <4E-8 M, <3E-8 M, <2E-8 M, <1E-8 M, <9E-9 M, <8E-9 M, <7E-9 M, <6E-9 M, <5E-9 M, <4E-9 M, <3E-9 M, <2.5E-9 M, <2E-9 M, <1.5E-9 M, <1E-9 M, <9E-10 M, <8E-10 M, <7E-10 M, <6E-10 M, <5E-10 M, <4E-10 M, <3E-10 M, <2.5E-10 M, <2E-10 M, <1.5E-10 M, <1E-10 M, or <9E-11 M
[1341] a) to an isolated polypeptide according to SEQ ID NO:43 and/or SEQ ID NO:46, wherein at least two or all of Y3, Y15 and Y17 have been sulfated, and/or
[1342] b) to an isolated polypeptide according to SEQ ID NO:44 and/or SEQ ID NO:47, wherein at least two or all of Y3, Y15 and Y17 have been sulfated, and/or
[1343] c) to an isolated polypeptide according to SEQ ID NO:45 and/or SEQ ID NO:48, wherein at least two or all of Y3, Y14 and Y15 have been sulfated.

[1344] In preferred embodiments of all aspects, the antibody or antigen-binding fragment (specifically) binds with an EC50 of <15 nM, <10 nM, <5 nM, <1 nM or <0.6 nM
[1345] a) to human CCR8 and/or to an isolated polypeptide according to SEQ ID NO:43 and/or SEQ ID NO:46, wherein at least two or all of Y3, Y15 and Y17 have been sulfated, and/or
[1346] b) to cynomolgus CCR8 and/or to an isolated polypeptide according to SEQ ID NO:44 and/or SEQ ID NO:47, wherein at least two or all of Y3, Y15 and Y17 have been sulfated, and/or
[1347] c) to murine CCR8 and/or to an isolated polypeptide according to SEQ ID NO:45 and/or SEQ ID NO:48, wherein at least two or all of Y3, Y14 and Y15 have been sulfated,
   and optionally binds with an EC50 of <50 nM, <25 nM, <15 nM or <10 nM to activated human regulatory T cells.

[1348] According to some most preferred of these embodiments, the EC50 of the antibody or antigen-binding fragment for binding to human CCR8 or to an isolated polypeptide according to SEQ ID NO:46, wherein at least two or all of Y3, Y15 and Y17 have been sulfated, is below 10 nM, 5 nM, 2.5 nM, 1 nM, 0.5 nM or 0.25 nM and the EC50 of the antibody or antigen-binding fragment for binding to cynomolgus CCR8 or to an isolated polypeptide according to SEQ ID NO:47, wherein at least two or all of Y3, Y15 and Y17 have been sulfated, is below 10 nM, 5 nM, 2.5 nM, 1 nM, 0.5 nM or 0.25 nM.

[1349] As disclosed for instance in example 10.1.1, the antibodies according to the current invention have excellent affinities for their respective target. For example, cross reactive antibodies TPP-21181, TPP-17578, TPP-19546, TPP-18206, TPP-21360 and TPP-23411 bound human CCR8 with an EC50 of 4.8 nM, 1.7 nM, 0.8 nM, 0.6 nM, ˜0.9 nM or 1.7 nM. Also, TPP-21181, TPP-17578, TPP-19546, TPP-18206, TPP-21360 and TPP-23411 bound cynomolgus CCR8 with an EC50 of 1.8 nM, 1 nM, 0.5 nM, 0.7 nM, ˜0.55 nM or 0.9 nM. In addition, TPP-17578, TPP-19546, TPP-18206, and TPP-21360 bound to human regulatory T cells with an EC50 of 25 nM, 15 nM, 23 nM or 10 nM. In addition, anti-murine CCR8 antibody TPP-14099 binds CHO cells expressing murine CCR8 with an EC50 of 3 nM and murine iTregs with an EC50 of 13.2 nM, cf. Table 10.1.1.5.

[1350] In preferred embodiments of all aspects, the antibody or antigen-binding fragment, preferably at a concentration of 10 nM,
[1351] a) does not or not substantially or to a lower degree than antibodies L263G8 and 433H block CCL1 induced β-arrestin signaling, and/or
[1352] b) does not or not substantially or to a lower degree than antibodies L263G8 and 433H induce ERK1/2 phosphorylation and/or
[1353] c) does not or not substantially or to a lower degree than antibodies L263G8 and 433H induce AKT phosphorylation.

[1354] In preferred embodiments of all aspects, the antibody or antigen-binding fragment blocks G protein dependent signaling of the chemokine receptor.

[1355] In preferred embodiments of all aspects, the antibody or antigen-binding fragment is afucosylated.

[1356] In preferred embodiments of all aspects, the antibody or antigen-binding fragment
[1357] a) binds to human Fc gamma receptor IIIA variant V176 (CD16a) with a dissociation constant (KD) lower than 530 nM, 500 nM, 450 nM, 400 nM, 300 nM or 200 nM, and/or
[1358] b) binds to human Fc gamma RITA (CD32a) with a dissociation constant (KD) lower than 30 μM, 20 μM, 10 μM, 5 μM or 1 μM.

[1359] In preferred embodiments of all aspects, the antibody or antigen-binding fragment
[1360] a) induces antibody-dependent cell-mediated cytotoxicity (ADCC) in target cells expressing human CCR8 via human effector cells, such as human NK cells, and/or
[1361] b) induces antibody-dependent cell-mediated phagocytosis (ADCP) in target cells expressing human CCR8 via human effector cells, such as human macrophages.

[1362] In preferred embodiments of all aspects, the antibody or antigen-binding fragment induces ADCC and/or ADCP and
[1363] a) the ADCC-induced maximal depletion of activated human regulatory T cells is at least 30%, 40%, 50%, 60%, 70%, 80%, 90%, 95%, 98% or 99%, and/or
[1364] b) the ADCP-induced maximal depletion of activated human regulatory T cells is at least at least 5%, 10%, 15%, 20%, 25%, 30%, 40% or 50%, and/or
[1365] c) the maximal depletion of intra-tumoral regulatory T cells, in vitro or in a subject, is at least 50%, 60%, 70%, 80%, 90%, 95% or 99%.

[1366] In preferred embodiments of all aspects, the EC50 of the antibody or antigen-binding fragment
[1367] a) for ADCC-induced depletion of activated human regulatory T cells is below 100 pM, 50 pM, 25 pM, 12.5 pM, 10 pM or 5 pM and/or
[1368] b) for ADCP-induced depletion of activated human regulatory T cells is below 500 pM, 250 pM, 200 pM, 150 pM, 100 pM, 75 pM, 50 pM or 25 pM.

[1369] In preferred embodiments of all aspects, an effective dose of the antibody or antigen-binding fragment
[1370] a) decreases the number of activated or intra-tumoral regulatory T cells, in vitro or in a subject, to less than 30%, 25%, 20%, 10%, 5% or 1% and/or
[1371] b) increases the ratio of intra-tumoral CD8+ T cells to intra-tumoral Tregs, in vitro or in a subject, to at least 5, 10, 15, 20, 25, 30, 40, 50, 60, 70, 80, 90, 100, 150, 200, or higher and/or
[1372] c) decreases the percentage of regulatory T cells of intra-tumoral CD4+ T cells, in vitro or in a subject, to <30%, <20%, <10% or <5%.

[1373] In preferred embodiments of all aspects, the antibody or antigen-binding fragment increases the absolute numbers of immune cells in a defined tumor volume, at least by a factor of 1.5, 2, 2.5, 3, 3.5 or 4, preferably wherein the immune cells are selected from
[1374] a) (intra-tumoral) CD45+ cells,
[1375] b) (intra-tumoral) CD8+ T cells,
[1376] c) (intra-tumoral) CD4+ T cells,
[1377] d) (intra-tumoral) macrophages, such as M1 macrophages or M2 macrophages,
[1378] e) (intra-tumoral) NK cells,
[1379] f) (intra-tumoral) B cells,
[1380] g) (intra-tumoral) Dendritic cells,
[1381] h) (intra-tumoral) Gamma delta T cells,
[1382] i) (intra-tumoral) iNKT cells,
   [1383] or any combination thereof.

[1384] For example, the immune cells are
[1385] a) CD8+ T cells, CD4+ T cells, and macrophages, or
[1386] b) CD8+ T cells, CD4+ T cells, NK cells and macrophages, or
[1387] c) CD8+ T cells, ACOD1+ macrophages (M1 macrophages), and B cells.

[1388] In preferred embodiments of all aspects, three or more effective doses of the antibody or antigen-binding fragment, in a tumor, increase
[1389] a) the number of intra-tumoral CD8+ T cells to at least 150%, 200%, 250%, 300% or 350%,
[1390] b) the ratio of intra-tumoral CD8+ T cells to intra-tumoral regulatory T cells to at least 4, 5, 10, 15, 20, 25, 30, 40, 50, 60, 70, 80, 90, 100, 150, 200, or higher,
[1391] c) the number of intra-tumoral macrophages at least by a factor of 2, 3, 4, or 5,
[1392] d) the number of intra-tumoral ACOD1+ macrophages (M1 macrophages) at least by a factor of 2, 3, 4, 5, 6, 7, 8, 9 or 10,
[1393] e) the ratio of ACOD1+ macrophages (M1 macrophages) to MRC1+ macrophages (M2 macrophages) to at least 1.5, 2, 3, 4, 5, 10, or higher,
[1394] f) the number of intra-tumoral NK cells to at least 140% or 200%,
[1395] g) the number of intra-tumoral CD3+ T cells to at least 150%, 200%, 300% or 400%,
[1396] h) the number of intra-tumoral B cells at least by a factor of 2, 5, 10, 20, 30 or 40,
[1397] i) the number of intra-tumoral CD45+ T cells to at least 150%, 200% or 300%, and/or
[1398] j) the number of intra-tumoral CD4+ T cells to at least 150%, 200%, 300% or 400%,
   preferably wherein the tumor is characterized by tumor infiltrating lymphocytes, such as tumor infiltrating T cells.

[1399] In preferred embodiments of all aspects, the antibody or antigen-binding fragment induces formation of tertiary lymphoid structures.

[1400] In preferred embodiments of all aspects, the antibody is an IgG antibody, preferably a human IgG1 or a murine IgG2a.

[1401] In preferred embodiments of all aspects, the antibody or antigen-binding fragment binds with an EC50 of <15 nM, <10 nM, <5 nM, <1 nM or <0.6 nM
[1402] a) to human CCR8 or to an isolated polypeptide according to SEQ ID NO:46, wherein at least two or all of Y3, Y15 and Y17 have been sulfated, and/or
[1403] b) to cynomolgus CCR8 or to an isolated polypeptide according to SEQ ID NO:47, wherein at least two or all of Y3, Y15 and Y17 have been sulfated, and/or
[1404] c) to murine CCR8 or to an isolated polypeptide according to SEQ ID NO:48, wherein at least two or all of Y3, Y14 and Y15 have been sulfated.

[1405] In preferred embodiments of all aspects, the EC50 of the antibody or antigen-binding fragment for binding to human CCR8 or to an isolated polypeptide according to SEQ ID NO:46, wherein at least two or all of Y3, Y15 and Y17 have been sulfated, is below 10 nM, 5 nM, 2.5 nM, 1 nM, 0.5 nM or 0.25 nM and the EC50 of the antibody or antigen-binding fragment for binding to cynomolgus CCR8 or to an isolated polypeptide according to SEQ ID NO:47, wherein at least two or all of Y3, Y15 and Y17 have been sulfated, is below 10 nM, 5 nM, 2.5 nM, 1 nM, 0.5 nM or 0.25 nM.

[1406] In preferred embodiments of all aspects, the isolated antibody or antigen-binding fragment binds with an EC50 of <50 nM, <25 nM, <15 nM or <10 nM to activated human regulatory T cells.

[1407] In preferred embodiments of all aspects, the dissociation constant of the antibody for binding the first isolated non-sulfated polypeptide is higher than 100 nM, 150 nM, 200 nM, 250 nM, 300 nM, 350 nM, 400 nM, 450 nM, 500 nM, 600 nM, 700 nM, 800 nM, 900 nM, 1 μM, 1.25 μM, 1.5 μM, 1.75 μM, 2 μM, 2.25 μM, 2.5 μM, 2.75 μM, or 3 μM, or is not detectable. Preferably, the dissociation constant of the antibody for binding the first isolated non-sulfated polypeptide is higher than 100 nM, 250 nM, 500 nM, 1 μM, 2 μM or 3 μM, or is not detectable.

### Most Preferred Combinations of “all Aspects”

[1408] Provided according to a preferred embodiment I is an isolated antibody or antigen-binding fragment thereof specifically binding to CCR8, wherein the antibody or antigen-binding fragment is non-internalizing or is characterized by an internalization into a cell with endogenous target expression which is lower than the 1.5, 2, 3, 4, 5, 6, 7, or 10-fold of the internalization of the isotype control.

[1409] Provided according to a preferred embodiment II is an isolated antibody or antigen-binding fragment thereof, specifically binding to CCR8, wherein the antibody or fragment is characterized by a HCDR3 region comprising between 10 and 34% of tyrosine and/or between 2 and 20% of histidine.

[1410] Provided according to a preferred embodiment III is an isolated antibody or antigen-binding fragment thereof specifically binding to CCR8, wherein the antibody comprises human derived CDRs.

[1411] Provided according to a preferred embodiment IV is an isolated antibody or antigen-binding fragment thereof specifically binding to CCR8, wherein the antibody or antigen-binding fragment is cross reactive for CCR8 from at least two species, preferably selected from human, cynomolgus and mouse, most preferably wherein the antibody or antigen-binding fragment is cross reactive for human and cynomolgus CCR8.

[1412] Provided according to a preferred embodiment V is an isolated antibody or antigen-binding fragment thereof, specifically binding to CCR8, wherein the antibody or antigen-binding fragment,
[1413] a. does not block CCL1 induced β-arrestin signaling and/or
[1414] b. does not induce ERK1/2 phosphorylation and/or
[1415] c. does not induce AKT phosphorylation.

[1416] Provided according to a preferred embodiment VI is an isolated antibody or antigen-binding fragment thereof specifically binding to CCR8, wherein the antibody or antigen-binding fragment is afucosylated and
[1417] a. induces antibody-dependent cell-mediated cytotoxicity (ADCC) in target cells expressing human CCR8 via human effector cells, such as human NK cells, and
[1418] b. induces antibody-dependent cell-mediated phagocytosis (ADCP) in target cells expressing human CCR8 via human effector cells, such as human macrophages,
[1419] c. wherein the maximal ADCC and ADCP induced in vitro depletion of target cells expressing human CCR8 is at least 30%, 35%, 40%, 45%, 50%, 55%, 60%, 70%, 80%, 90%, 95% or 99%.

[1420] Provided according to a preferred embodiment VII is the isolated antibody or antigen-binding fragment according to any of preferred embodiments II to VI, wherein the antibody or antigen-binding fragment is non-internalizing or is characterized by an internalization into a cell with endogenous target expression which is lower than the 1.5, 2, 3, 4, 5, 6, 7, or 10-fold of the internalization of the isotype control.

[1421] Provided according to a preferred embodiment VIII is the isolated antibody or antigen-binding fragment according to any of preferred embodiments I, or III to VII, wherein the antibody or antigen-binding fragment is characterized by a HCDR3 region comprising between 10 and 34% of tyrosine and/or between 2 and 20% of histidine.

[1422] Provided according to a preferred embodiment IX is the isolated antibody or antigen-binding fragment according to any of preferred embodiments I to II, or W to VIII, wherein the antibody comprises human derived CDRs.

[1423] Provided according to a preferred embodiment X is the isolated antibody or antigen-binding fragment according to any of preferred embodiments I to III, or V to IX, wherein the antibody or antigen-binding fragment is cross reactive for CCR8 from at least two species, preferably selected from human, cynomolgus and mouse, most preferably wherein the antibody or antigen-binding fragment is cross reactive for human and cynomolgus CCR8.

[1424] Provided according to a preferred embodiment XI is the isolated antibody or antigen-binding fragment according to any of preferred embodiments I to X, wherein the antibody or antigen-binding fragment binds the CCR8 from a first species with a first dissociation constant KD and binds the CCR8 from a second species with a second dissociation constant KD, wherein the first and the second dissociation constant are in the same order of magnitude.

[1425] Provided according to a preferred embodiment XII is the isolated antibody or antigen-binding fragment according to any of preferred embodiments I to IV, or VI to XI, wherein the antibody or antigen-binding fragment,
[1426] a. does not block CCL1 induced β-arrestin signaling and/or
[1427] b. does not induce ERK1/2 phosphorylation and/or
[1428] c. does not induce AKT phosphorylation.

[1429] Provided according to a preferred embodiment XIII is the isolated antibody or antigen-binding fragment according to any of preferred embodiments I to V, or VII to XII, wherein the antibody or antigen-binding fragment
[1430] a. induces antibody-dependent cell-mediated cytotoxicity (ADCC) in target cells expressing human CCR8 via human effector cells, such as human NK cells, and
[1431] b. induces antibody-dependent cell-mediated phagocytosis (ADCP) in target cells expressing human CCR8 via human effector cells, such as human macrophages, and optionally
[1432] c. wherein the maximal ADCC and ADCP induced in vitro depletion of target cells expressing human CCR8 is at least 30%, 35%, 40%, 45%, 50%, 55%, 60%, 70%, 80%, 90%, 95% or 99%.

[1433] Provided according to a preferred embodiment XIV is the isolated antibody or antigen-binding fragment according to any of preferred embodiments I to XIII, wherein the antibody or antigen-binding fragment specifically binds to the sulfated tyrosine rich domain of CCR8.

[1434] Provided according to a preferred embodiment XV is the isolated antibody or antigen-binding fragment according to any of preferred embodiments I to XIV, wherein the antibody or antigen-binding fragment specifically binds (i) with an EC50 of <15 nM, <10 nM, <5 nM, <1 nM or <0.6 nM
[1435] a. to human CCR8 and/or to an isolated polypeptide according to SEQ ID NO:46, wherein at least two or all of Y3, Y15 and Y17 have been sulfated, and/or
[1436] b. to cynomolgus CCR8 and/or to an isolated polypeptide according to SEQ ID NO:47, wherein at least two or all of Y3, Y15 and Y17 have been sulfated, and/or
[1437] c. to murine CCR8 and/or to an isolated polypeptide according to SEQ ID NO:48, wherein at least two or all of Y3, Y14 and Y15 have been sulfated, and/or (ii) with an EC50 of <50 nM, <25 nM, <15 nM or <10 nM to activated human regulatory T cells.

[1438] Provided according to a preferred embodiment XVI is the isolated antibody or antigen-binding fragment thereof according to any of preferred embodiments I to XV,
[1439] a. wherein the antibody or antigen-binding fragment binds to human Fc gamma receptor IIIA variant V176 (CD16a) with a dissociation constant (KD) lower than 530 nM, 500 nM, 450 nM, 400 nM, 300 nM or 200 nM, and/or
[1440] b. wherein the antibody or antigen-binding fragment binds to human Fc gamma RITA (CD32a) with a dissociation constant (KD) lower than 30 μM, 20 μM, 10 μM, 5 μM or 1 μM.

[1441] Provided according to a preferred embodiment XVII is the isolated antibody or antigen-binding fragment thereof according to any of preferred embodiments I to XVI, wherein the antibody or antigen-binding fragment is afucosylated.

[1442] Provided according to a preferred embodiment XVIII is the isolated antibody or antigen-binding fragment thereof according to any of preferred embodiments I to XVII, wherein the antibody or antigen-binding fragment
[1443] a. induces antibody-dependent cell-mediated cytotoxicity (ADCC) in target cells expressing human CCR8 via human effector cells, such as human NK cells, and/or
[1444] b. induces antibody-dependent cell-mediated phagocytosis (ADCP) in target cells expressing human CCR8 via human effector cells, such as human macrophages, preferably, wherein
[1445] c. the ADCC-induced maximal depletion of activated human regulatory T cells is at least 25%, 30%, 35%, 40%, 45%, 50%, 55%, 60%, 70%, 80%, 90%, 95%, 98% or 99%, and/or
[1446] d. the ADCP-induced maximal depletion of activated human regulatory T cells is at least 5%, 10%, 15%, 20%, 25%, 30%, 40% or 50%, and/or
[1447] e. the maximal ADCC and ADCP induced in vitro depletion of activated human regulatory T cells is at least 30%, 35%, 40%, 45%, 50%, 55%, 60%, 70%, 80%, 90%, 95% or 99%.

[1448] Provided according to a preferred embodiment XIX is the isolated antibody or antigen-binding fragment according to any of preferred embodiments I to XVIII, wherein
[1449] a. the EC50 of the antibody or antigen-binding fragment for ADCC-induced depletion of activated human regulatory T cells is below 100 pM, 50 pM, 25 pM, 12.5 pM, 10 pM or 5 pM and/or
[1450] b. the EC50 of the antibody or antigen-binding fragment for ADCP-induced depletion of activated human regulatory T cells is below 500 pM, 250 pM, 200 pM, 150 pM, 100 pM, 75 pM, 50 pM or 25 pM.

[1451] Provided according to a preferred embodiment XX is the isolated antibody or antigen-binding fragment according to any previous preferred embodiment, wherein an effective dose of the antibody or antigen-binding fragment
[1452] a. decreases the number of activated or intra-tumoral regulatory T cells, in vitro or in a subject, to less than 50%, 40%, 30%, 25%, 20%, 10%, 5% or 1% and/or
[1453] b. increases the ratio of intra-tumoral CD8+ T cells to intra-tumoral Tregs, in vitro or in a subject, to at least 5, 10, 15, 20, 25, 30, 40, 50, 60, 70, 80, 90, 100, 150, 200, or higher and/or
[1454] c. decreases the percentage of regulatory T cells of intra-tumoral CD4+ T cells, in vitro or in a subject, to <30%, <20%, <10% or <5%.

[1455] Provided according to a preferred embodiment XXI is the isolated antibody or antigen-binding fragment according to any previous preferred embodiment, wherein an effective dose of the antibody or antigen-binding fragment induces formation of tertiary lymphoid structures in a tumor.

[1456] Provided according to a preferred embodiment XXII is the isolated antibody or antigen-binding fragment thereof according to any previous preferred embodiment, wherein the antibody is an IgG antibody, preferably a human IgG1 or a murine IgG2a, and or wherein the antigen-binding fragment is an scFv, Fab, Fab′ or a F(ab′)2 fragment.

[1457] Provided according to a preferred embodiment XXIII is a conjugate comprising an antibody or antigen-binding fragment according to any of preferred embodiments I to XXII, preferably wherein the conjugate comprises
[1458] a. a radioactive element,
[1459] b. a cytotoxic agent, such as an auristatin, a maytansinoid, a kinesin-spindle protein inhibitor, a nicotinamide phosphoribosyltransferase inhibitor or a pyrrolobenzodiazepine derivative,
[1460] c. a further antibody or antigen-binding fragment, or
[1461] d. a chimeric antigen receptor.

[1462] Provided according to a preferred embodiment XXIV is a pharmaceutical composition comprising an antibody or antigen-binding fragment according to any of preferred embodiments I to XXII or a conjugate according to preferred embodiment XXIII.

[1463] Provided according to a preferred embodiment XXV is the pharmaceutical composition according to preferred embodiment XXIV, comprising one or more further therapeutically active compounds, preferably selected from
[1464] a. an antibody or compound targeting a checkpoint protein, such as PD1, PD-L1 or CTLA-4, preferably wherein the antibody or compound targeting the checkpoint protein is Nivolumab, Pembrolizumab, Atezolizumab, Avelumab, Durvalumab, Cemiplimab, Dostarlimab or Ipilimumab,
[1465] b. an antibody targeting a further chemokine receptor, such as CCR1, CCR2, CCR3, CCR4, CCR5, CCR6, CCR7, CCR9, CCR10, CXCR1, CXCR2, CXCR3, CXCR4, CXCR5, CXCR6, CX3CR1 or CXCR1,
[1466] c. an antibody or a small molecule targeting HER2 and/or EGFR,
[1467] d. the standard of care for any of head and neck cancer, breast cancer, gastric cancer, lung cancer, squamous cell carcinoma and esophageal tumor, melanoma, bladder cancer, liver cancer, and/or prostate cancer,
[1468] e. a chemotherapeutic agent, preferably a taxane, paclitaxel, doxorubicin, cis-platin, carboplatin, oxaliplatin, or gemcitabine,
[1469] e. a B cell depleting agent, such as an anti-CD19 antibody or an anti-CD20 antibody and/or
[1470] f. a targeted kinase inhibitor, such as Sorafinib, Regorafenib, or MEKi-1.

[1471] Provided according to a preferred embodiment XXVI is an antibody or antigen-binding fragment according to any of preferred embodiments I to XXII or a conjugate according to preferred embodiment XXIII or a pharmaceutical composition according to preferred embodiment XXIV or XXV for use as a medicament.

[1472] Provided according to a preferred embodiment XXVII is the antibody or antigen-binding fragment according to any of preferred embodiments I to XXII or a conjugate according to preferred embodiment XXIII or a pharmaceutical composition according to preferred embodiment XXIV or XXV for use in the treatment of a tumor or a disease characterized by CCR8 positive cells, such as CCR8 positive regulatory T cells.

[1473] Provided according to a preferred embodiment XXVIII is an antibody or antigen-binding fragment according to any of preferred embodiments I to XXII or a conjugate according to preferred embodiment XXIII or a pharmaceutical composition according to preferred embodiment XXIV or XXV for use in simultaneous, separate, or sequential combination (i) with one or more further therapeutically active compounds, preferably selected from
[1474] a. an antibody or a small molecule targeting a checkpoint protein, such as PD1, PD-L1 or CTLA-4, preferably wherein the antibody or small molecule targeting a checkpoint protein is Nivolumab, Pembrolizumab, Atezolizumab, Avelumab, Durvalumab, Cemiplimab, Dostarlimab or Ipilimumab,
[1475] b. an antibody targeting a further chemokine receptor, such as CCR1, CCR2, CCR3, CCR4, CCR5, CCR6, CCR7, CCR8, CCR9, CCR10, CXCR1, CXCR2, CXCR3, CXCR4, CXCR5, CXCR6, CX3CR1 or CXCR1,
[1476] c. an antibody targeting a protein which is specifically expressed by the tumor cells,
[1477] d. an antibody or a small molecule targeting HER2 and/or EGFR,
[1478] e. the standard of care for any of head and neck cancer, breast cancer, gastric cancer, lung cancer, squamous cell carcinoma, esophageal tumor, melanoma, bladder cancer, liver cancer, and/or prostate cancer,
[1479] f. a chemotherapeutic agent, preferably a taxane, paclitaxel, doxorubicin, cis-platin, carboplatin, oxaliplatin, or gemcitabine and/or
[1480] g. a targeted kinase inhibitor, such as Sorafinib, Regorafenib, or MEKi-1, and/or
   (ii) with radiation therapy, and/or (iii) with depletion of intra-tumoral B cells, in the treatment of a tumor or a disease characterized by CCR8 positive cells, such as CCR8 positive regulatory T cells.

[1481] Provided according to a preferred embodiment XXIX is the antibody, fragment, conjugate or pharmaceutical composition for use according to preferred embodiment XXVII or XXVIII, wherein the tumor is selected from the group of T-cell acute lymphoblastic leukemia, breast cancer, triple-negative breast cancer, triple positive breast cancer, non-small cell lung cancer (NSCLC), small cell lung cancer (SCLC), testicular cancer, gastric cancer, head and neck squamous cell carcinoma, thymoma, esophageal adenocarcinoma, colorectal cancer, pancreatic adenocarcinoma, ovarian cancer or cervical cancer, acute myeloid leukemia, kidney cancer, bladder cancer, skin cancer, melanoma, thyroid cancer, mesothelioma, sarcoma and prostate cancer, B cell lymphoma, T cell lymphoma, or any other cancer involving CCR8 expressing cells, preferably wherein the tumor is selected from head and neck cancer, breast cancer, gastric cancer, lung cancer, squamous cell carcinoma, esophageal tumor, melanoma, bladder cancer, liver cancer, prostate cancer, B cell lymphoma and T cell lymphoma. Provided according to a preferred embodiment XXX is the antibody, fragment, conjugate or pharmaceutical composition for use according to preferred embodiment XXVI to XXIX, wherein the use comprises determining
[1482] a. presence or quantity of tumor infiltrating lymphocytes,
[1483] b. presence or quantity of macrophages and/or NK cells,
[1484] c. presence or quantity of CCR8 positive or FOXP3 positive regulatory T cells,
[1485] d. tumor mutational burden,
[1486] e. cancer staging,
[1487] f. presence, level or activation of interferon-stimulated genes or proteins,
[1488] g. CCR8 expression,
[1489] h. presence or quantity of complement factor proteins, serpins, and/or MHC components,
[1490] i. presence or quantity of cytokines, such as inflammatory or suppressive cytokines,
[1491] j. activation of immune gene expression, and/or
[1492] k. immune checkpoint (protein) expression, such as PD-(L)1 or CTLA4 expression,
[1493] l. presence or quantity of tumor infiltrating CD19+ B cells,
[1494] m. presence or quantity of tumor infiltrating CD8+ T cells;
   to predict or monitor treatment success.

[1495] Provided according to a preferred embodiment XXXI is a polynucleotide encoding an antibody or antigen-binding fragment according to any of preferred embodiments I to XXII.

[1496] Provided according to a preferred embodiment XXXII is a vector comprising a polynucleotide according to preferred embodiment XXXI.

[1497] Provided according to a preferred embodiment XXXIII is an isolated cell arranged for production of an antibody or antigen-binding fragment according to any of preferred embodiments I to XXII.

[1498] Provided according to a preferred embodiment XXXIV is a method of producing an antibody or antigen-binding fragment according to any of preferred embodiments I to XXII or a conjugate according to preferred embodiment XXIII, comprising culturing a cell according to preferred embodiment XXXIII and optionally purification of the antibody or antigen-binding fragment.

[1499] Provided according to a preferred embodiment XXXV is the antibody or antigen-binding fragment according to any of preferred embodiments I to XXII or a conjugate according to preferred embodiment XXIII for use as a diagnostic agent in vivo or in vitro.

[1500] Provided according to a preferred embodiment XXXVI is kit comprising an antibody or antigen-binding fragment according to any of preferred embodiments I to XXII or a conjugate according to preferred embodiment XXIII or a pharmaceutical composition according to preferred embodiment XXIV or XXV with instructions for use.

### Aspect 19—Antibody Conjugates

[1501] In addition to naked antibodies, various further antibody- or antibody fragment-based conjugates can be designed using the antibodies or antigen binding fragments disclosed herein. These conjugates may be conjugates for diagnosis, therapy, research applications, and various other purposes. Provided are for example antibodies or antigen binding fragments thereof conjugated to radionuclides, cytotoxic agents, organic compounds, protein toxins, immunomodulators such as cytokines, fluorescent moieties, cells, further antibodies or antigen binding fragments thereof.

[1502] The conjugates disclosed herein, e.g. antibody drug conjugates (ADCs), targeted thorium conjugates (TTCs), bispecific antibodies etc., are “modular” in nature. Throughout the disclosure, various specific embodiments of the various “modules” composing the conjugates are described. As specific non-limiting examples, specific embodiments of antibodies or fragments thereof, linkers, and cytotoxic and/or cytostatic agents that may compose the ADCs are described. It is intended that all of the specific embodiments described may be combined with each other as though each specific combination was explicitly described individually.

[1503] According to a 19^{th} aspect, there is provided a conjugate comprising an antibody or antigen-binding fragment according to the 6^{th}, 7^{th}, 8^{th}, 9^{th}, 10^{th}, 11^{th}, 12^{th}, 13^{th}, 14^{th}, 15^{th}, 16^{th}, 17^{th} and/or 18^{th} aspect or a combination thereof. For example, the conjugate comprises an antibody or antigen-binding fragment according to the 6^{th} aspect. For example, the conjugate comprises an antibody or antigen-binding fragment according to the 7^{th} aspect. For example, the conjugate comprises an antibody or antigen-binding fragment according to the 8^{th} aspect. For example, the conjugate comprises an antibody or antigen-binding fragment according to the 9^{th} aspect. For example, the conjugate comprises an antibody or antigen-binding fragment according to the 10^{th} aspect. For example, the conjugate comprises an antibody or antigen-binding fragment according to the 11^{th} aspect. For example, the conjugate comprises an antibody or antigen-binding fragment according to the 12^{th} aspect. For example, the conjugate comprises an antibody or antigen-binding fragment according to the 13^{th} aspect. For example, the conjugate comprises an antibody or antigen-binding fragment according to the 14^{th} aspect. For example, the conjugate comprises an antibody or antigen-binding fragment according to the 15^{th} aspect. For example, the conjugate comprises an antibody or antigen-binding fragment according to the 16^{th} aspect. For example, the conjugate comprises an antibody or antigen-binding fragment according to the 17^{th} aspect. For example, the conjugate comprises an antibody or antigen-binding fragment according to the 18^{th} aspect.

[1504] According to some preferred embodiments the conjugate comprises (a) a radioactive element, (b) a cytotoxic agent, such as an auristatin, a maytansinoid, a kinesin-spindle protein (KSP) inhibitor, a nicotinamide phosphoribosyltransferase (NAMPT) inhibitor or a pyrrolobenzodiazepine derivative, (c) a further antibody or antigen-binding fragment, (d) a chimeric antigen receptor.

### Radioconjugates

[1505] According to some first embodiments of the 19^{th} aspect, the conjugate comprises or is arranged to comprise a radionuclide, such as a beta particle, an alpha particle, or an Auger electron emitter. Suitable beta emitters according to the current invention are for example yttrium-90, iodine-131, strontium-89-chloride, lutetium-177, holmium-166, rhenium-186, rhenium-188, copper-67, promethium-149, gold-199, and rhodium-105. Suitable Auger electron emitters, according to the current invention are for example bromine-77, indium-111, iodine-123, and iodine-125. Suitable alpha emitters, according to the current invention are for example thorium-227, bismuth-213, radium-223, actinium-225 and astatine-211.

[1506] For example, thorium-227 (227Th) can be efficiently complexed with octadentate 3,2-hydroxypyridinone (3,2-HOPO) chelators that are conjugated to antibodies according to the current invention, resulting in highly stable targeted thorium-227 conjugates (TTCs), as described in example 13. Targeted thorium conjugates (TTCs) comprise three main building blocks. Following the β-particle decay of actinium-227, the first building block, α-particle-emitting radionuclide 227Th is purified by ion exchange chromatography. The second building block is a chelator, such as a siderophore-derived chelator containing HOPO groups bearing four 3-hydroxy-N-methyl-2-pyridinone moieties on a symmetrical polyamine scaffold functionalized with a carboxylic acid linker for bioconjugation. Conjugation to a targeting moiety can be achieved through the amide bond formation with the ε-amino groups of lysine residues. These octadentate 3,2-HOPO chelators can be efficiently labeled with, 227Th, with high yield, purity, and stability at ambient conditions. Compared with the tetra-azacyclododecane-1,4,7,10-tetraacetic acid (DOTA) chelator, which often requires heating, the HOPO chelators are superior due to efficient radiolabeling at ambient temperatures and high stability of formed complexes. The third building block is the targeting moiety, that is the chemokine receptor antibody or antigen binding fragment thereof according to any of the 6^{th} aspects 6, 7, 8, 9, 10, 11, 12, 13, 14, 15, 16, 17 or 18.

### ADCs

[1507] According to some second embodiments of the 19^{th} aspect, the conjugate comprises a cytotoxic agent, e.g. to form an antibody drug conjugate (ADC).

[1508] In some preferred embodiments, the cytotoxic agent is an auristatin, a maytansinoid, a kinesin-spindle protein (KSP) inhibitor, a nicotinamide phosphoribosyltransferase (NAMPT) inhibitor or a pyrrolobenzodiazepine derivative. Generation of conjugates comprising maytansinoid may occur as described in Chari, Ravi V J, et al. “Immunoconjugates containing novel maytansinoids: promising anticancer drugs.” Cancer research 52.1 (1992): 127-131, or EP2424569 B1, both incorporated herein in their entirety. Generation of conjugates comprising kinesin-spindle protein (KSP) inhibitors may occur as described in WO2019243159 A1, incorporated herein in its entirety. Generation of conjugates comprising a nicotinamide phosphoribosyltransferase (NAMPT) inhibitor may occur as described in WO2019149637 A1, incorporated herein in its entirety. Generation of conjugates comprising a pyrrolobenzodiazepine may be obtained as described in EP3355935 A1, incorporated herein in its entirety.

[1509] The cytotoxic and/or cytostatic agent of the anti-chemokine receptor or anti-CCR8 ADC may be any agent known to inhibit the growth and/or replication of, and/or kill cells. Numerous agents having cytotoxic and/or cytostatic properties are known in the literature. Non-limiting examples of classes of cytotoxic and/or cytostatic agents include, by way of example and not limitation, cell cycle modulators, apoptosis regulators, kinase inhibitors, protein synthesis inhibitors, alkylating agents, DNA cross-linking agents, intercalating agents, mitochondria inhibitors, nuclear export inhibitors, topoisomerase I inhibitors, topoisomerase II inhibitors, RNA/DNA antimetabolites and antimitotic agents.

[1510] The linkers linking the cytotoxic and/or cytostatic agent(s) to the antigen binding moiety of an anti-chemokine receptor or anti-CCR8 ADC may be long, short, flexible, rigid, hydrophilic or hydrophobic in nature, or may comprise segments that have different characteristics, such as segments of flexibility, segments of rigidity, etc. The linker may be chemically stable to extracellular environments, for example, chemically stable in the blood stream, or may include linkages that are not stable and release the cytotoxic and/or cytostatic agents in the extracellular milieu. In some embodiments, the linkers include linkages that are designed to release the cytotoxic and/or cytostatic agents upon internalization of the anti-chemokine receptor or anti-CCR8 ADC, within the cell. In some specific embodiments, the linkers include linkages designed to cleave and/or immolate or otherwise breakdown specifically or non-specifically inside cells. A wide variety of linkers useful for linking drugs to antigen binding moieties such as antibodies in the context of ADCs are known in the art. Any of these linkers, as well as other linkers, may be used to link the cytotoxic and/or cytostatic agents to the antigen binding moiety of the anti-chemokine receptor or anti-CCR8 ADCs, described herein.

[1511] The number of cytotoxic and/or cytostatic agents linked to the antigen binding moiety of an anti-chemokine receptor or anti-CCR8 ADC (drug-to-antibody ratio: DAR) can vary and will be limited only by the number of available attachments sites on the antigen binding moiety and the number of agents linked to a single linker. Typically, a linker will link a single cytotoxic and/or cytostatic agent to the antigen binding moiety of an anti-chemokine receptor or anti-CCR8 ADC. In embodiments of anti-chemokine receptor or anti-CCR8 ADCs, which include more than a single cytotoxic and/or cytostatic agent, each agent may be the same or different. As long as the anti-chemokine receptor or anti-CCR8 ADC, does not exhibit unacceptable levels of aggregation under the conditions of use and/or storage, anti-chemokine receptor or anti-CCR8 ADCs, with DARs of twenty, or even higher, are contemplated. In some embodiments, the anti-chemokine receptor or anti-CCR8 ADCs, described herein may have a DAR in the range of about 1-10, 1-8, 1-6, or 1-4. In certain specific embodiments, the anti-chemokine receptor or anti-CCR8 ADC may have a DAR of 2, 3 or 4. In some embodiments, the anti-chemokine receptor or anti-CCR8 ADCs, are compounds according to structural formula (I):

[D-L-XY]n-Ab (I)

or salts thereof, where each “D” represents, independently of the others, a cytotoxic and/or cytostatic agent; each “L” represents, independently of the others, a linker; “Ab” represents an anti-chemokine receptor binding moiety, e.g. an anti-CCR8 antibody according to the current invention; each “XY” represents a linkage formed between a functional group Rx on the linker and a “complementary” functional group Ry on the anti-chemokine receptor binding moiety; and n represents the DAR of the anti-chemokine receptor ADC.

[1512] In a specific exemplary embodiment, the anti-chemokine receptor ADCs are compounds according to structural formula (I) in which each “D” is the same and is either a cell-permeating auristatin (for example, dolastatin-10 or MMAE) or a cell-permeating minor groove-binding DNA cross-linking agent; each “L” is the same and is a linker cleavable by a lysosomal enzyme; each “XY” is a linkage formed between a maleimide and a sulfhydryl group; “Ab” is an antibody or fragment thereof comprising six CDRs corresponding to the six CDRs of an anti-chemokine receptor or CCR8 antibody according to the current invention; and n is 2, 3 or 4. In a specific embodiment “Ab” is a fully human antibody comprising human derived CDRs.

[1513] Cytotoxic and cytostatic agents are agents known to inhibit the growth and/or replication of and/or kill cells and in particular tumor cells or intra-tumoral Treg cells. These compounds may be used in a combination therapy with an anti-chemokine receptor antibody such as a CCR8 antibody, or as part of an anti-chemokine receptor ADC as described herein:

[1514] In some embodiments, the drug moiety of the anti-chemokine receptor or anti-CCR8 ADC is a cytostatic agent selected from radionuclides, alkylating agents, DNA cross-linking agents, DNA intercalating agents (e.g., groove binding agents such as minor groove binders), cell cycle modulators, apoptosis regulators, kinase inhibitors, protein synthesis inhibitors, mitochondria inhibitors, nuclear export inhibitors, topoisomerase I inhibitors, topoisomerase II inhibitors, RNA/DNA antimetabolites and antimitotic agents. In some embodiments, the drug moiety of the anti-chemokine receptor or anti-CCR8 ADC is an alkylating agent selected from asaley (L-Leucine, N-[N-acetyl-4-[bis-(2-chloroethyl)amino]-DL-phenylalanyl]-, ethylester); AZQ (1,4-cyclohexadiene-1,4-dicarbamic acid, 2,5-bis(1-aziridinyl)-3,6-dioxo-, diethyl ester); BCNU (N,N′-Bis(2-chloroethyl)-N-nitrosourea); busulfan (1,4-butanediol dimethanesulfonate); (carboxyphthalato)platinum; CBDCA (cis-(1,1-cyclobutanedicarboxylato)diammineplatinum(II))); CCNU (N-(2-chloroethyl)-N′-cyclohexyl-N-nitrosourea); CHIP (iproplatin; NSC 256927); chlorambucil; chlorozotocin (2-[[[(2-chloroethyl) nitrosoamino]carbonyl]amino]-2-deoxy-D-glucopyranose); cis-platinum (cisplatin); clomesone; cyanomorpholinodoxorubicin; cyclodisone; dianhydrogalactitol (5,6-diepoxydulcitol); fluorodopan ((5-[(2-chloroethyl)-(2-fluoroethyl)amino]-6-methyl-uracil); hepsulfam; hycanthone; indolinobenzodiazepine dimer DGN462; melphalan; methyl CCNU ((1-(2-chloroethyl)-3-(trans-4-methylcyclohexane)-1-nitrosourea); mitomycin C; mitozolamide; nitrogen mustard ((bis(2-chloroethyl) methylamine hydrochloride); PCNU ((1-(2-chloroethyl)-3-(2,6-dioxo-3-piperidyl)-1-nitrosourea)); piperazine alkylator ((1-(2-chloroethyl)-4-(3-chloropropyl)-piperazine dihydrochloride)); piperazinedione; pipobroman (N,N′-bis(3-bromopropionyl) piperazine); porfiromycin (N-methylmitomycin C); spirohydantoin mustard; teroxirone (triglycidylisocyanurate); tetraplatin; thio-tepa (N,N,N″-tri-1,2-ethanediylthio phosphoramide); triethylenemelamine; uracil nitrogen mustard (desmethyldopan); Yoshi-864 ((bis(3-mesyloxy propyl)amine hydrochloride).

[1515] In some embodiments, the drug moiety of the anti-chemokine receptor or anti-CCR8 ADC is a DNA alkylating-like agent selected from Cisplatin; Carboplatin; Nedaplatin; Oxaliplatin; Satraplatin; Triplatin tetranitrate; Procarbazine; altretamine; dacarbazine; mitozolomide; temozolomide.

[1516] In some embodiments, the drug moiety of the anti-chemokine receptor or anti-CCR8 ADC is an alkylating antineoplastic agents selected from Carboquone; Carmustine; Chlornaphazine; Chlorozotocin; Duocarmycin; Evofosfamide; Fotemustine; Glufosfamide; Lomustine; Mannosulfan; Nimustine; Phenanthriplatin; Pipobroman; Ranimustine; Semustine; Streptozotocin; ThioTEPA; Treosulfan; Triaziquone; Triethylenemelamine; Triplatin tetranitrate.

[1517] In some embodiments, the drug moiety of the anti-chemokine receptor or anti-CCR8 ADC is a DNA replication and repair inhibitor selected from Altretamine; Bleomycin; Dacarbazine; Dactinomycin; Mitobronitol; Mitomycin; Pingyangmycin; Plicamycin; Procarbazine; Temozolomide; ABT-888 (veliparib); olaparib; KU-59436; AZD-2281; AG-014699; BSI-201; BGP-15; INO-1001; ONO-2231.

[1518] In some embodiments, the drug moiety of the anti-chemokine receptor or anti-CCR8 ADC is a cell cycle modulator, such as Paclitaxel; Nab-Paclitaxel; Docetaxel; Vincristine; Vinblastine; ABT-348; AZD-1152; MLN-8054; VX-680; Aurora A-specific kinase inhibitors; Aurora B-specific kinase inhibitors and pan-Aurora kinase inhibitors; AZD-5438; BMI-1040; BMS-032; BMS-387; CVT-2584; flavopyridol; GPC-286199; MCS-5A; PD0332991; PHA-690509; seliciclib (CYC-202, R-roscovitine); ZK-304709; AZD4877, ARRY-520: GSK923295A.

[1519] In some embodiments, the drug moiety of the anti-chemokine receptor or anti-CCR8 ADC is an apoptosis regulator such as AT-101 ((−)gossypol); G3139 or oblimersen (Bcl-2-targeting antisense oligonucleotide); IPI-194; IPI-565; N-(4-(4-((4′-chloro(1,1′-biphenyl)-2-yl)methyl)piperazin-1-ylbenzoyl)-4-(((1R)-3-(dimethylamino)-1-((phenylsulfanyl)methyl)propyl)amino)-3-nitrobenzenesulfonamide); N-(4-(4-((2-(4-chlorophenyl)-5,5-dimethyl-1-cyclohex-1-en-1-yl)methyl)piperazin-1-yl)benzoyl)-4-(((1R)-3-(morpholin-4-yl)-1-((phenylsulfanyl)methyl)propyl)amino)-3-((trifluoromethyl)sulfonyl)benzenesulfonamide; GX-070 (Obatoclax®; 1H-Indole, 2-(2-((3,5-dimethyl-1H-pyrrol-2-yl)methylene)-3-methoxy-2H-pyrrol-5-yl)-)); HGS1029; GDC-0145; GDC-0152; LCL-161; LBW-242; venetoclax; agents that target TRAIL or death receptors (e.g., DR4 and DR5) such as ETR2-ST01, GDC0145, HGS-1029, LBY-135, PRO-1762; drugs that target caspases, caspase-regulators, BCL-2 family members, death domain proteins, TNF family members, Toll family members, and/or NF-kappa-B proteins.

[1520] In some embodiments, the drug moiety of the anti-chemokine receptor or anti-CCR8 ADC is an angiogenesis inhibitor such as ABT-869; AEE-788; axitinib (AG-13736); AZD-2171; CP-547,632; IM-862; pegaptamib; sorafenib; BAY43-9006; pazopanib (GW-786034); vatalanib (PTK-787, ZK-222584); sunitinib; SU-11248; VEGF trap; vandetanib; ABT-165; ZD-6474; DLL4 inhibitors.

[1521] In some embodiments, the drug moiety of the anti-chemokine receptor or anti-CCR8 ADC is a proteasome inhibitor such as Bortezomib; Carfilzomib; Epoxomicin; Ixazomib; Salinosporamide A.

[1522] In some embodiments, the drug moiety of the anti-chemokine receptor or anti-CCR8 ADC is a kinase inhibitor such as Afatinib; Axitinib; Bosutinib; Crizotinib; Dasatinib; Erlotinib; Fostamatinib; Gefitinib; Ibrutinib; Imatinib; Lapatinib; Lenvatinib; Mubritinib; Nilotinib; Pazopanib; Pegaptanib; Sorafenib; Sunitinib; SU6656; Vandetanib; Vemurafenib; CEP-701 (lesaurtinib); XL019; INCB018424 (ruxolitinib); ARRY-142886 (selemetinib); ARRY-438162 (binimetinib); PD-325901; PD-98059; AP-23573; CCI-779; everolimus; RAD-001; rapamycin; temsirolimus; ATP-competitive TORC1/TORC2 inhibitors including PI-103, PP242, PP30, Torin 1; LY294002; XL-147; CAL-120; ONC-21; AEZS-127; ETP-45658; PX-866; GDC-0941; BGT226; BEZ235; XL765.

[1523] In some embodiments, the drug moiety of the anti-chemokine receptor or anti-CCR8 ADC is a protein synthesis inhibitor such as Streptomycin; Dihydrostreptomycin; Neomycin; Framycetin; Paromomycin; Ribostamycin; Kanamycin; Amikacin; Arbekacin; Bekanamycin; Dibekacin; Tobramycin; Spectinomycin; Hygromycin B; Paromomycin; Gentamicin; Netilmicin; Sisomicin; Isepamicin; Verdamicin; Astromicin; Tetracycline; Doxycycline; Chlortetracycline; Clomocycline; Demeclocycline; Lymecycline; Meclocycline; Metacycline; Minocycline; Oxytetracycline; Penimepicycline; Rolitetracycline; Tetracycline; Glycylcyclines; Tigecycline; Oxazolidinone; Eperezolid; Linezolid; Posizolid; Radezolid; Ranbezolid; Sutezolid; Tedizolid; Peptidyl transferase inhibitors; Chloramphenicol; Azidamfenicol; Thiamphenicol; Florfenicol; Pleuromutilins; Retapamulin; Tiamulin; Valnemulin; Azithromycin; Clarithromycin; Dirithromycin; Erythromycin; Flurithromycin; Josamycin; Midecamycin; Miocamycin; Oleandomycin; Rokitamycin; Roxithromycin; Spiramycin; Troleandomycin; Tylosin; Ketolides; Telithromycin; Cethromycin; Solithromycin; Clindamycin; Lincomycin; Pirlimycin; Streptogramins; Pristinamycin; Quinupristin/dalfopristin; Virginiamycin.

[1524] In some embodiments, the drug moiety of the anti-chemokine receptor or anti-CCR8 ADC is a histone deacetylase inhibitor such as Vorinostat; Romidepsin; Chidamide; Panobinostat; Valproic acid; Belinostat; Mocetinostat; Abexinostat; Entinostat; SB939 (pracinostat); Resminostat; Givinostat; Quisinostat; thioureidobutyronitrile (Kevetrin™); CUDC-10; CHR-2845 (tefinostat); CHR-3996; 4SC-202; CG200745; ACY-1215 (rocilinostat); ME-344; sulforaphane.

[1525] In some embodiments, the drug moiety of the anti-chemokine receptor or anti-CCR8 ADC is a topoisomerase I inhibitor such as camptothecin; various camptothecin derivatives and analogs (for example, NSC 100880, NSC 603071, NSC 107124, NSC 643833, NSC 629971, NSC 295500, NSC 249910, NSC 606985, NSC 74028, NSC 176323, NSC 295501, NSC 606172, NSC 606173, NSC 610458, NSC 618939, NSC 610457, NSC 610459, NSC 606499, NSC 610456, NSC 364830, and NSC 606497); morpholinisoxorubicin; SN-38.

[1526] In some embodiments, the drug moiety of the anti-chemokine receptor or anti-CCR8 ADC is a topoisomerase II inhibitor such as doxorubicin; amonafide (benzisoquinolinedione); m-AMSA (4′-(9-acridinylamino)-3′-methoxymethanesulfonanilide); anthrapyrazole derivative ((NSC 355644); etoposide (VP-16); pyrazoloacridine ((pyrazolo[3,4,5-kl]acridine-2(6H)-propanamine, 9-methoxy-N, N-dimethyl-5-nitro-, monomethanesulfonate); bisantrene hydrochloride; daunorubicin; deoxydoxorubicin;

[1527] mitoxantrone; menogaril; N,N-dibenzyl daunomycin; oxanthrazole; rubidazone; teniposide. In some embodiments, the drug moiety of the anti-chemokine receptor or anti-CCR8 ADC is a DNA intercalating agent such as anthramycin; chicamycin A; tomaymycin; DC-81; sibiromycin; pyrrolobenzodiazepine derivative; SGD-1882 ((S)-2-(4-aminophenyl)-7-methoxy-8-(3 S)-7-methoxy-2-(4-methoxyphenyl)-5-oxo-5,11a-dihydro-1H-benzo[e]pyrrolo[1,2-a][1,4]diazepin-8-yl)oxy)propoxy)-1H-benzo[e]pyrrolo[1,2-a][1,4]diazepin-5(11aH)-one); SG2000 (SJG-136; (11aS,11a′S)-8,8′-(propane-1,3-diylbis(oxy))bis(7-methoxy-2-methylene-2,3-dihydro-1H-benzo[e]pyrrolo[1,2-a][1,4]diazepin-5(11aH)-one)).

[1528] In some embodiments, the drug moiety of the anti-chemokine receptor or anti-CCR8 ADC is a RNA/DNA antimetabolite such as L-alanosine; 5-azacytidine; 5-fluorouracil; acivicin; aminopterin derivative N-[2-chloro-5[[(2, 4-diamino-5-methyl-6-quinazolinyl)methyl]amino]benzoyl]L-aspartic acid (NSC 132483); aminopterin derivative N-[4-[[(2, 4-diamino-5-ethyl-6-quinazolinyl)methyl]amino]benzoyl]L-aspartic acid; aminopterin derivative N-[2-chloro-4-[[(2, 4-diamino-6-pteridinyl)methyl]amino]benzoyl]L-aspartic acid monohydrate; antifolate PT523 ((Nα-(4-amino-4-deoxypteroyl)-Nγ-hemiphthaloyl-L-ornithine)); Baker's soluble antifol (NSC 139105); dichlorallyl lawsone ((2-(3, 3-dichloroallyl)-3-hydroxy-1,4-naphthoquinone); brequinar; ftorafur ((pro-drug; 5-fluoro-1-(tetrahydro-2-furyl)-uracil); 5,6-dihydro-5-azacytidine; methotrexate; methotrexate derivative (N-[[4-[[(2, 4-diamino-6-pteridinyl)methyl]methylamino]-1-naphthalenyl]carbonyl]L-glutamic acid); PALA ((N-(phosphonoacetyl)-L-aspartate); pyrazofurin; trimetrexate.

[1529] In some embodiments, the drug moiety of the anti-chemokine receptor or anti-CCR8 ADC is a DNA antimetabolite such as 3-HP; 2′-deoxy-5-fluorouridine; 5-HP; α-TGDR (α-2′-deoxy-6-thioguanosine); aphidicolin glycinate; ara C (cytosine arabinoside); 5-aza-2′-deoxycytidine; β-TGDR (β-2′-deoxy-6-thioguanosine); cyclocytidine; guanazole; hydroxyurea; inosine glycodialdehyde; macbecin II; pyrazoloimidazole; thioguanine; thiopurine.

[1530] In some embodiments, the drug moiety of the anti-chemokine receptor or anti-CCR8 ADC, is a mitochondria inhibitor such as pancratistatin; phenpanstatin; rhodamine-123; edelfosine; d-alpha-tocopherol succinate; compound 11β; aspirin; ellipticine; berberine; cerulenin; GX015-070 (Obatoclax®; 1H-Indole, 2-(2-((3,5-dimethyl-1H-pyrrol-2-yl)methylene)-3-methoxy-2H-pyrrol-5-yl)-); celastrol (tripterine); metformin; Brilliant green; ME-344.

[1531] In some embodiments, the drug moiety of the anti-chemokine receptor or anti-CCR8 ADC, is an antimitotic agent such as allocolchicine; auristatins, such as MMAE (monomethyl auristatin E) and MMAF (monomethyl auristatin F); halichondrin B; cemadotin; colchicine; cholchicine derivative (N-benzoyl-deacetyl benzamide); dolastatin-10; dolastatin-15; maytansine; maytansinoids, such as DM1 (N2′-deacetyl-N2′-(3-mercapto-1-oxopropyl)-maytansine); rhozoxin; paclitaxel; paclitaxel derivative ((2′-N-[3-(dimethylamino)propyl]glutaramate paclitaxel); docetaxel; thiocolchicine; trityl cysteine; vinblastine sulfate; vincristine sulfate.

[1532] In some embodiments, the drug moiety of the anti-chemokine receptor or anti-CCR8 ADC is a nuclear export inhibitor such as callystatin A; delactonmycin; KPT-185 (propan-2-yl (Z)-3-[3-[3-methoxy-5-(trifluoromethyl)phenyl]-1,2,4-triazol-1-yl]prop-2-enoate); kazusamycin A; leptolstatin; leptofuranin A; leptomycin B; ratjadone; Verdinexor ((Z)-3-[3-[3,5-bis(trifluoromethyl)phenyl]-1,2,4-triazol-1-yl]-N-pyridin-2-ylprop-2-enehydrazide).

[1533] In some embodiments, the drug moiety of the anti-chemokine receptor or anti-CCR8 ADC is a hormonal therapeutics such as anastrozole; exemestane; arzoxifene; bicalutamide; cetrorelix; degarelix; deslorelin; trilostane; dexamethasone; flutamide; raloxifene; fadrozole; toremifene; fulvestrant; letrozole; formestane; glucocorticoids; doxercalciferol; sevelamer carbonate; lasofoxifene; leuprolide acetate; megesterol; mifepristone; nilutamide; tamoxifen citrate; abarelix; prednisone; finasteride; rilostane; buserelin; luteinizing hormone releasing hormone (LHRH); Histrelin; trilostane or modrastane; fosrelin; goserelin.

[1534] Any of these agents that include, or that may be modified to include, a site of attachment to an antibody and/or binding fragment can be included in an anti-chemokine receptor ADC, e.g. in an anti-CCR8 ADC.

### CAR T Cells

[1535] According to some third embodiments of the 19^{th} aspect, the conjugate is a CAR T cell conjugate engineered for chemokine receptor or CCR8 targeting. Recently, CART cells have gained attention from their clinical successes and expedited FDA approvals, cf. WO2020102240, incorporated herein in its entirety. In the CAR T cell approach, T cells are collected from patient blood and are then genetically engineered to express CARs that are specific for an antigen present on tumor cells. These engineered T cells are then re-administered to the same patient. Upon injection, CAR T cells recognize the targeted antigen on target cells to induce target cell death. T cells expressing chimeric antigen receptors (CAR T cells) thus constitute a novel modality for medical uses such as tumor treatment. The chimeric antigen receptor (CAR) is a genetically engineered receptor that is designed to target a specific antigen, for example, a tumor antigen. This targeting can result in cytotoxicity against the tumor, for example, such that CAR T cells expressing CARs can target and kill tumors via the specific tumor antigens.

[1536] According to the present invention, the antibodies or antigen binding fragments provided for CCR8 or chemokine receptor recognition can be used to engineer CAR T cells for specific recognition of CCR8 expressing cells or cells expressing the respective chemokine receptor. CARs according to the current invention may comprise
[1537] a) a recognition region, e.g., a single chain fragment variable (scFv) region derived from a provided anti-CCR8 or anti-chemokine receptor antibody for recognition and binding to the CCR8 or chemokine receptor expressed by the target cell, and
[1538] b) an activation signaling domain, e.g., the CD3 chain of T cells, which can serve as a T cell activation signal in CARs.

[1539] Preferably, the CARs according to the current invention comprise a co-stimulation domain (e.g., CD137, CD28 or CD134) to achieve prolonged activation of T cells in vivo. Addition of a co-stimulation domain enhances the in vivo proliferation and survival of T cells containing CARs, and initial clinical data have shown that such constructs are promising therapeutic agents in the treatment of diseases, such as cancer. According to the current invention, the CAR T cells can be used to treat any disease with local or systemic aberrant presence of cells expressing the target chemokine receptor, in particular CCR8 expressing cells, such as Treg cells.

### Bispecifics

[1540] According to some fourth embodiments of the 19^{th} aspect, the conjugate is a bispecific antibody or a multispecific antibody. In some preferred embodiments the bispecific antibody comprises at least one Fc domain.

[1541] In some preferred embodiments of the 19^{th} aspect, the first binding moiety of the bispecific antibody is an antibody or antigen binding fragment according to the 6^{th}, 7^{th}, 8^{th}, 9^{th}, 10^{th}, 11^{th}, 12^{th}, 13^{th}, 14^{th}, 15^{th}, 16^{th}, 17^{th} and/or 18^{th} aspect.

[1542] In some embodiments A of the fourth embodiments of the 19^{th} aspect, the first binding moiety of the bispecific antibody is an antibody or antigen binding fragment according to the 6^{th}, 7^{th}, 8^{th}, 9^{th}, 10^{th}, 11^{th}, 12^{th}, 13^{th}, 14^{th}, 15^{th}, 16^{th}, 17^{th} and/or 18^{th} aspect and the second binding moiety of the bispecific antibody is the same or a different antibody or antigen binding fragment according to the 6^{th}, 7^{th}, 8^{th}, 9^{th}, 10^{th}, 11^{th}, 12^{th}, 13^{th}, 14^{th}, 15^{th}, 16^{th} 17^{th} and/or 18^{th} aspect.

[1543] In some embodiments B of the fourth embodiments of the 19^{th} aspect, the first binding moiety of the bispecific antibody is an antibody or antigen binding fragment according to the 6^{th}, 7^{th}, 8^{th}, 9^{th}, 10^{th}, 11^{th}, 12^{th}, 13^{th}, 14^{th}, 15^{th}, 16^{th}, 17^{th} and/or 18^{th} aspect binding human CCR8 and the second binding moiety of the bispecific antibody is an antibody or antigen binding fragment binding to a different chemokine receptor, such as CCR1, CCR2, CCR3, CCR4, CCR5, CCR6, CCR7, CCR8, CCR9, CCR10, CXCR1, CXCR2, CXCR3, CXCR4, CXCR5, CXCR6, CX3CR1 or CXCR1. For example, the second binding moiety of the bispecific antibody is Mogamulizumab or an antigen binding fragment thereof.

[1544] In some embodiments C of the fourth embodiments of the 19^{th} aspect, the first binding moiety of the bispecific antibody is an antibody or antigen binding fragment according to the 6^{th}, 7^{th}, 8^{th}, 9^{th}, 10^{th}, 11^{th}, 12^{th}, 13^{th}, 14^{th}, 15^{th}, 16^{th}, 17^{th} and/or 18^{th} aspect, preferably binding CCR8, and the second binding moiety of the bispecific antibody is an antibody or antigen binding fragment binding to a cell-surface protein such as cell surface protein expressed on immune cells or a tissue- or cell type-specific antigen. In some of these embodiments, the second binding moiety of the bispecific antibody is an antibody or antigen binding fragment targeting a checkpoint protein, such as an anti-PD1 antibody, an anti-PD-L1 antibody, or a CTLA-4 antibody. Suitable checkpoint protein targeting antibodies include Nivolumab, Pembrolizumab, Atezolizumab, Avelumab, Durvalumab, Cemiplimab, Dostarlimab, or Ipilimumab. In some other of these embodiments, the second binding moiety of the bispecific antibody is a HER2 targeting antibody, such as Trastuzumab, Pertuzumab and/or Margetuximab.

[1545] In some embodiments D of the fourth embodiments of the 19^{th} aspect, the first binding moiety of the bispecific antibody is an antibody or antigen binding fragment according to the 6^{th}, 7^{th}, 8^{th}, 9^{th}, 10^{th}, 11^{th}, 12^{th}, 13^{th}, 14^{th}, 15^{th}, 16^{th}, 17^{th} and/or 18^{th} aspect, preferably binding CCR8, and the second binding moiety of the bispecific antibody is an antibody or antigen binding fragment binding to a cell surface molecule associated with T-cell activation, preferably selected from CD25, CTLA-4, PD-1, LAG3, TIGIT, ICOS, and TNF receptor super family members, 4-1BB, OX-40, and GITR.

[1546] Techniques for making bi- or multispecific antibodies include, but are not limited to, recombinant co-expression of two immunoglobulin heavy chain-light chain pairs having different specificities (see Milstein and Cuello. “Hybrid hybridomas and their use in immunohistochemistry.” Nature 305.5934 (1983): 537-540; WO1993008829 A1, and Traunecker, André, Antonio Lanzavecchia, and Klaus Karjalainen. “Bispecific single chain molecules (Janusins) target cytotoxic lymphocytes on HIV infected cells.” The EMBO Journal 10.12 (1991): 3655-3659), and chemical conjugation of two different monoclonal antibodies (see Staerz, Uwe D., Osami Kanagawa, and Michael J. Bevan. “Hybrid antibodies can target sites for attack by T cells.” Nature 314.6012 (1985): 628-631). Multispecific antibodies may also be made by cross-linking two or more antibodies or fragments (see, e.g., U.S. Pat. No. 4,676,980, and Brennan, Maureen, Peter F. Davison, and Henry Paulus. “Preparation of bispecific antibodies by chemical recombination of monoclonal immunoglobulin G1 fragments.” Science 229.4708 (1985): 81-83), using leucine zippers to produce bi-specific antibodies (see, e.g., Kostelny, Sheri A., M. S. Cole, and J. Yun Tso. “Formation of a bispecific antibody by the use of leucine zippers.” The Journal of Immunology 148.5 (1992): 1547-1553), using diabody technology for making bispecific antibody fragments (see, e.g., Holliger, Philipp, Terence Prospero, and Greg Winter. “ ” Diabodies“: small bivalent and bispecific antibody fragments.” Proceedings of the National Academy of Sciences 90.14 (1993): 6444-6448), using single-chain Fv (sFv) dimers (see, e.g. Gruber, Meegan, et al. “Efficient tumor cell lysis mediated by a bispecific single chain antibody expressed in Escherichia coli.” The Journal of immunology 152.11 (1994): 5368-5374), by preparing trispecific antibodies as described (e.g., in Tutt, Alison, G. T. Stevenson, and M. J. Glennie. “Trispecific F (ab′) 3 derivatives that use cooperative signaling via the TCR/CD3 complex and CD2 to activate and redirect resting cytotoxic T cells.” The Journal of Immunology 147.1 (1991): 60-69), and by controlled Fab arm exchange (cFAE) according to Labrijn, Aran F., et al. “Efficient generation of stable bispecific IgG1 by controlled Fab-arm exchange.” Proceedings of the National Academy of Sciences 110.13 (2013): 5145-5150.

### Conjugates for Diagnosis and Research Applications

[1547] According to some fifth embodiments of the 19^{th} aspect, the conjugate comprises a detectable moiety. Examples of detectable moieties include various enzymes, prosthetic groups, fluorescent materials, luminescent materials, bioluminescent materials, radioactive materials, positron emitting metals, nonradioactive paramagnetic metal ions and reactive moieties. The detectable substance can be coupled or conjugated either directly to the antibody or fragment thereof or indirectly, e.g. through a linker known in the art or another moiety, using techniques known in the art. Examples of enzymatic labels include luciferases (e.g., firefly luciferase and bacterial luciferase; U.S. Pat. No. 4,737,456), luciferin, 2,3-dihydrophthalazinediones, malate dehydrogenase, urease, peroxidase such as horseradish peroxidase (HRPO), alkaline phosphatase, β-galactosidase, acetylcholinesterase, glucoamylase, lysozyme, saccharide oxidases (e.g., glucose oxidase, galactose oxidase, and glucose-6-phosphate dehydrogenase), heterocyclic oxidases (such as uricase and xanthine oxidase), lactoperoxidase, microperoxidase, and the like. Examples of suitable prosthetic group complexes include streptavidin/biotin and avidin/biotin; examples of suitable fluorescent materials include umbelliferone, fluorescein, fluorescein isothiocyanate, rhodamine, dichlorotriazinylamine fluorescein, dansyl chloride or phycoerythrin; an example of a luminescent material includes luminol; examples of bioluminescent materials include luciferase, luciferin, and aequorin; and examples of suitable radioactive material include 1251, 1311, 111In or 99mTc. Detection of expression of a chemokine receptor or CCR8 generally involves contacting a biological sample (tumor, cells, tissue, or body fluid of an individual) with one or more antibodies or fragments according to the current invention (optionally conjugated to a detectable moiety), and detecting whether or not the sample is positive for the chemokine receptor or CCR8, or whether the sample has altered (e.g., reduced or increased) expression as compared to a control sample.

### Aspect 20—Pharmaceutical Composition

[1548] According to a 20^{th} aspect, there is provided a pharmaceutical composition comprising an antibody or antigen-binding fragment according to the 6^{th}, 7^{th}, 8^{th}, 9^{th}, 10^{th}, 11^{th}, 12^{th}, 13^{th}, 14^{th}, 15^{th}, 16^{th}, 17^{th} and/or 18^{th} aspect, or a conjugate according to the 19^{th} aspect. Preferably, the pharmaceutical composition comprises an antibody or fragment thereof or a conjugate according to any one of the embodiments described herein, or a combination thereof, in a therapeutically effective amount together with a pharmaceutically acceptable carrier, excipient, or stabilizer.

[1549] Pharmaceutical compositions can be prepared by mixing the antibody, fragment, or conjugate having the desired degree of purity with optional physiologically acceptable carriers, excipients or stabilizers (Remington, Joseph Price. Remington: The science and practice of pharmacy. Vol. 1. Lippincott Williams & Wilkins, 2006). Pharmaceutical compositions may be for example in the form of lyophilized formulations or aqueous solutions.

### Carriers, Excipients, Stabilizers

[1550] Acceptable carriers, excipients, or stabilizers are nontoxic to recipients at the dosages and concentrations employed, and include buffers such as phosphate buffer (e.g. PBS), citrate buffer, and other organic acid buffer; antioxidants including ascorbic acid and methionine; preservatives (such as octadecyldimethylbenzyl ammonium chloride; hexamethonium chloride; benzalkonium chloride, benzethonium chloride; phenol, butyl or benzyl alcohol; alkyl parabens such as methyl or propyl paraben;

[1551] catechol; resorcinol; cyclohexanol; 3-pentanol; and m-cresol); low molecular weight (e.g. less than about 10 residues) polypeptide; proteins, such as serum albumin, gelatin, or immunoglobulins; hydrophilic polymers such as polyvinylpyrrolidone; amino acids such as glycine, glutamine, asparagine, histidine, arginine, or lysine; monosaccharides, disaccharides, and other carbohydrates including glucose, mannose, or dextrins; chelating agents such as EDTA; sugars such as sucrose, mannitol, trehalose or sorbitol; salt-forming counter-ions such as sodium; metal complexes (e.g., Zn-protein complexes); and/or non-ionic surfactants such as Tween®, Pluronic® or polyethylene glycol (PEG).

### Multiple Therapeutically Active Compounds

[1552] According to the current invention a pharmaceutical composition may contain more than one active compound, e.g. as necessary or beneficial for the particular indication being treated.

[1553] According to some first embodiments of the 20^{th} aspect, the pharmaceutical composition comprises one or more further therapeutically active compounds.

[1554] In some preferred of the first embodiments of the 20^{th} aspect, the pharmaceutical composition comprises an antibody or antigen-binding fragment according to the 6^{th}, 7^{th}, 8^{th}, 9^{th}, 10^{th}, 11^{th}, 12^{th}, 13^{th}, 14^{th}, 15^{th}, 16^{th}, 17^{th} and/or 18^{th} aspect, or a conjugate according to the 19^{th} aspect and
[1555] a) an antibody or a small molecule targeting a checkpoint protein, such as PD1, PD-L1 or CTLA-4, and/or
[1556] b) an antibody targeting a further chemokine receptor, such as CCR1, CCR2, CCR3, CCR4, CCR5, CCR6, CCR7, CCR8, CCR9, CCR10, CXCR1, CXCR2, CXCR3, CXCR4, CXCR5, CXCR6, CX3CR1 or CXCR1, and/or
[1557] c) an antibody targeting a protein which is specifically expressed by tumor cells and/or
[1558] d) an antibody or a small molecule targeting HER2 and/or EGFR, and/or
[1559] e) the standard of care for any of head and neck cancer, breast cancer, gastric cancer, lung cancer, squamous cell carcinoma, esophageal tumor, melanoma, bladder cancer, liver cancer, and/or prostate cancer, and/or
[1560] f) a chemotherapeutic agent, preferably a taxane, paclitaxel, doxorubicin, cis-platin, carboplatin, oxaliplatin, paclitaxel or gemcitabine, and/or
[1561] g) a targeted kinase inhibitor, such as Sorafinib, Regorafenib, or MEKi-1.

### Combination with Checkpoint Inhibitors

[1562] According to some preferred embodiments A of the first embodiments of the 20^{th} aspect, the pharmaceutical composition furthermore comprises an antibody or a small molecule targeting a checkpoint protein, such as PD1, PD-L1 or CTLA-4. Suitable checkpoint targeting antibodies include Nivolumab (PD1; Human IgG4), Pembrolizumab (PD1; Humanized IgG4), Atezolizumab (PD-L1; Humanized IgG1), Avelumab (PD-L1; Human IgG1), Durvalumab (PD-L1; Human IgG1), Cemiplimab, cemiplimab-rwlc (PD-1; Human mAb), Dostarlimab (TSR-042) (PD-1; Humanized IgG4), or Ipilimumab (CTLA-4; Human IgG1).

[1563] In some embodiments, the antibody or a small molecule targeting a checkpoint protein targets CTLA-4, PDL1, PDL2, PD1, B7-H3, B7-H4, BTLA, HVEM, TIM3, GALS, LAG3, VISTA, KIR, 2B4, CD160, CGEN-15049, CHK 1, CHK2, A2aR, B-7 family ligands or a combination thereof.

### Combination with Chemokine Receptor Antibodies

[1564] According to some preferred embodiments B of the first embodiments of the 20^{th} aspect, the pharmaceutical composition furthermore comprises an antibody or a small molecule targeting a further chemokine receptor, such as CCR1, CCR2, CCR3, CCR4, CCR5, CCR6, CCR7, CCR8, CCR9, CCR10, CXCR1, CXCR2, CXCR3, CXCR4, CXCR5, CXCR6, CX3CR1 or CXCR1. Suitable antibodies targeting a further chemokine receptor include the antibodies provided according to the 6^{th}, 7^{th}, 8^{th}, 9^{th}, 10^{th}, 11^{th}, 12^{th}, 13^{th}, 14^{th}, 15^{th}, 16^{th}, 17^{th} and/or 18^{th} aspect, or Mogamulizumab.

### Combination with HER2 or EGFR Targeting Antibodies or Molecules

[1565] According to some preferred embodiments C of the first embodiments of the 20^{th} aspect, the pharmaceutical composition furthermore comprises an antibody or a small molecule targeting HER2 and/or EGFR. Suitable antibodies targeting HER2 are Trastuzumab (HER2; Humanized IgG1), Pertuzumab (HER2; humanized IgG1), Ado-trastuzumab emtansine (HER2; humanized IgG1; ADC), [fam-]trastuzumab deruxtecan, fam-trastuzumab deruxtecan-nxki (HER2; Humanized IgG1 ADC), Sacituzumab govitecan; sacituzumab govitecan-hziy (TROP-2; Humanized IgG1 ADC) and/or Margetuximab (HER2; Chimeric IgG1). Suitable antibodies targeting EGFR are Cetuximab (EGFR; Chimeric IgG1), Panitumumab (EGFR; Human IgG2), and Necitumumab (EGFR; Human IgG1).

### Combination with Therapeutic Antibodies

[1566] According to some embodiments D of the first embodiments of the 20^{th} aspect, the pharmaceutical composition comprises a further therapeutic antibody selected from Muromonab-CD3 (CD3; Murine IgG2a), Efalizumab (CD11a; Humanized IgG1), Tositumomab-I131 (CD20; Murine IgG2a), Nebacumab (Endotoxin; Human IgM), Edrecolomab (EpCAM; Murine IgG2a), Catumaxomab (EPCAM/CD3; Rat/mouse bispecific mAb), Daclizumab (IL-2R; Humanized IgG1), Abciximab (GPIIb/IIIa; Chimeric IgG1 Fab), Rituximab (CD20; Chimeric IgG1), Basiliximab (IL-2R; Chimeric IgG1), Palivizumab (RSV; Humanized IgG1), Infliximab (TNF; Chimeric IgG1), Trastuzumab (HER2; Humanized IgG1), Adalimumab (TNF; Human IgG1), Ibritumomab tiuxetan (CD20; Murine IgG1), Omalizumab (IgE; Humanized IgG1), Cetuximab (EGFR; Chimeric IgG1), Bevacizumab (VEGF; Humanized IgG1), Natalizumab (a4 integrin; Humanized IgG4), Panitumumab (EGFR; Human IgG2), Ranibizumab (VEGF; Humanized IgG1 Fab), Eculizumab (C5; Humanized IgG2/4), Certolizumab pegol (TNF; Humanized Fab, pegylated), Ustekinumab (IL-12/23; Human IgG1), Canakinumab (IL-1β; Human IgG1), Golimumab (TNF; Human IgG1), Ofatumumab (CD20; Human IgG1), Tocilizumab (IL-6R; Humanized IgG1), Denosumab (RANK-L; Human IgG2), Belimumab (BLyS; Human IgG1), Ipilimumab (CTLA-4; Human IgG1), Brentuximab vedotin (CD30; Chimeric IgG1; ADC), Pertuzumab (HER2; humanized IgG1), Ado-trastuzumab emtansine (HER2; humanized IgG1; ADC), Raxibacumab (B. anthrasis PA; Human IgG1), Obinutuzumab (CD20; Humanized IgG1 Glycoengineered), Siltuximab (IL-6; Chimeric IgG1), Ramucirumab (VEGFR2; Human IgG1), Vedolizumab (α4β7 integrin; humanized IgG1), Nivolumab (PD1; Human IgG4), Pembrolizumab (PD1; Humanized IgG4), Blinatumomab (CD19, CD3; Murine bispecific tandem scFv), Alemtuzumab (CD52; Humanized IgG1), Evolocumab (PCSK9; Human IgG2), Idarucizumab (Dabigatran; Humanized Fab), Necitumumab (EGFR; Human IgG1), Dinutuximab (GD2; Chimeric IgG1), Secukinumab (IL-17a; Human IgG1), Mepolizumab (IL-5; Humanized IgG1), Alirocumab (PCSK9; Human IgG1), Daratumumab (CD38; Human IgG1), Elotuzumab (SLAMF7; Humanized IgG1), Ixekizumab (IL-17a; Humanized IgG4), Reslizumab (IL-5; Humanized IgG4), Olaratumab (PDGFRα; Human IgG1), Bezlotoxumab (Clostridium difficile enterotoxin B; Human IgG1), Atezolizumab (PD-L1; Humanized IgG1), Obiltoxaximab (B. anthrasis PA; Chimeric IgG1), Brodalumab (IL-17R; Human IgG2), Dupilumab (IL-4R α; Human IgG4), Inotuzumab ozogamicin (CD22; Humanized IgG4; ADC), Guselkumab (IL-23 p19; Human IgG1), Sarilumab (IL-6R; Human IgG1), Avelumab (PD-L1; Human IgG1), Emicizumab (Factor Ixa, X; Humanized IgG4, bispecific), Ocrelizumab (CD20; Humanized IgG1), Benralizumab (IL-5R α; Humanized IgG1), Durvalumab (PD-L1; Human IgG1), Gemtuzumab ozogamicin (CD33; Humanized IgG4; ADC), Erenumab, erenumab-aooe (CGRP receptor; Human IgG2), Galcanezumab, galcanezumab-gnlm (CGRP; Humanized IgG4), Burosumab, burosumab-twza (FGF23; Human IgG1), Lanadelumab, lanadelumab-flyo (Plasma kallikrelin; Human IgG1), Mogamulizumab, mogamulizumab-kpkc (CCR4; Humanized IgG1), Tildrakizumab; tildrakizumab-asmn (IL-23 p19; Humanized IgG1), Fremanezumab, fremanezumab-vfrm (CGRP; Humanized IgG2), Ravulizumab, ravulizumab-cwvz (C5; Humanized IgG2/4), Cemiplimab, cemiplimab-rwlc (PD-1; Human mAb), Ibalizumab, ibalizumab-uiyk (CD4; Humanized IgG4), Emapalumab, emapalumab-lzsg (IFNg; Human IgG1), Moxetumomab pasudotox, moxetumomab pasudotox-tdfk (CD22; Murine IgG1 dsFv immunotoxin), Caplacizumab, caplacizumab-yhdp (von Willebrand factor; Humanized Nanobody), Risankizumab, risankizumab-rzaa (IL-23 p19; Humanized IgG1), Polatuzumab vedotin, polatuzumab vedotin-piiq (CD79b; Humanized IgG1 ADC), Romosozumab, romosozumab-aqqg (Sclerostin; Humanized IgG2), Brolucizumab, brolucizumab-dbll (VEGF-A; Humanized scFv), Crizanlizumab; crizanlizumab-tmca (CD62 (aka P-selectin); Humanized IgG2), Enfortumab vedotin, enfortumab vedotin-ejfv (Nectin-4; Human IgG1 ADC), [fam-]trastuzumab deruxtecan, fam-trastuzumab deruxtecan-nxki (HER2; Humanized IgG1 ADC), Teprotumumab, teprotumumab-trbw (IGF-1R; Human IgG1), Eptinezumab, eptinezumab-jjmr (CGRP; Humanized IgG1), Isatuximab, isatuximab-irfc (CD38; Chimeric IgG1), Sacituzumab govitecan; sacituzumab govitecan-hziy (TROP-2; Humanized IgG1 ADC), Inebilizumab (CD19; Humanized IgG1), Leronlimab (CCR5; Humanized IgG4), Satralizumab (IL-6R; Humanized IgG2), Narsoplimab (MASP-2, Human IgG4), Tafasitamab (CD19; Humanized IgG1), REGNEB3 (Ebola virus; mixture of 3 human IgG1), Naxitamab (GD2; Humanized IgG1), Oportuzumab monatox (EpCAM; Humanized scFv immunotoxin), Belantamab mafodotin (B-cell maturation antigen; Humanized IgG1 ADC), Margetuximab (HER2; Chimeric IgG1), Tanezumab (Nerve growth factor; Humanized IgG2), Dostarlimab (TSR-042) (PD-1; Humanized IgG4), Teplizumab (CD3; Humanized IgG1), Aducanumab (Amyloid beta; Human IgG1), Sutimlimab (BIVV009) (C1s; Humanized IgG4), Evinacumab (Angiopoietin-like 3; Human IgG4).

### Combination with Cytotoxic or Cytostatic Agents

[1567] According to some embodiments E of the first embodiments of the 20^{th} aspect, the pharmaceutical composition furthermore comprises a cytostatic and/or cytotoxic agent selected from radionuclides, alkylating agents, DNA cross-linking agents, DNA intercalating agents (e.g., groove binding agents such as minor groove binders), cell cycle modulators, apoptosis regulators, kinase inhibitors, protein synthesis inhibitors, mitochondria inhibitors, nuclear export inhibitors, topoisomerase I inhibitors, topoisomerase II inhibitors, RNA/DNA antimetabolites and antimitotic agents, as described according to the second embodiments of the 19^{th} aspect.

[1568] In some preferred embodiments, the cytotoxic agent is an auristatin, a maytansinoid, a kinesin-spindle protein (KSP) inhibitor, a nicotinamide phosphoribosyltransferase (NAMPT) inhibitor or a pyrrolobenzodiazepine derivative.

### Aspect 21—Med Use/Methods of Treatment

[1569] According to a 21^{st} aspect, there is provided the antibody or antigen binding fragment according to the 6^{th}, 7^{th}, 8^{th}, 9^{th}, 10^{th}, 11^{th}, 12^{th}, 13^{th}, 14^{th}, 15^{th}, 16^{th}, 17^{th} and/or 18^{th} aspect, or a conjugate according to the 19^{th} aspect or the pharmaceutical composition according to the 20^{th} aspect for use as a medicament.

[1570] Also, there is provided the use of the antibody or antigen binding fragment according to the 6^{th}, 7^{th}, 8^{th}, 9^{th}, 10^{th}, 11^{th}, 12^{th}, 13^{th}, 14^{th}, 15^{th}, 16^{th}, 17^{th} and/or 18^{th} aspect, or a conjugate according to the 19^{th} aspect or the pharmaceutical composition according to the 20^{th} aspect for the manufacture of a medicament, e.g. for the treatment of a tumor or a disease involving cells expressing a chemokine receptor and in particular CCR8.

[1571] Furthermore, there is provided a method of treating a disease, the method comprising administering an effective dose of the antibody or antigen binding fragment according to the 6^{th}, 7^{th}, 8^{th}, 9^{th}, 10^{th}, 11^{th}, 12^{th}, 13^{th}, 14^{th}, 15^{th}, 16^{th}, 17^{th} and/or 18^{th} aspect, or a conjugate according to the 19^{th} aspect or the pharmaceutical composition according to the 20^{th} aspect to a patient in need thereof.

[1572] For therapeutic applications, the antibody or antigen binding fragment or the conjugate or the pharmaceutical composition according to the invention, can be administered to a patient or subject, e.g. to a human or non-human subject, in a pharmaceutically acceptable dosage form. For example, administration may occur intravenously as a bolus or by continuous infusion over a period of time, by intramuscular, intraperitoneal, intra-cerebrospinal, subcutaneous, intra-articular, intrasynovial, intrathecal, oral, topical, or inhalation routes. The antibodies, fragments, conjugates and pharmaceutical compositions according to the current invention are particularly suitable to be administered by intra-tumoral, pen-tumoral, intra-lesional, or peri-lesional routes, to exert local as well as systemic therapeutic effects.

[1573] Possible administration routes include parenteral (e.g., intramuscular, intravenous, intra-arterial, intraperitoneal, or subcutaneous), intrapulmonary and intranasal. In addition, the antibodies, fragments, conjugates and pharmaceutical compositions might be administered by pulse infusion, with, e.g., declining doses of the antibody, fragment or conjugate. Preferably, the dosing is given by injections, most preferably intravenous or subcutaneous injections, depending in part on whether the administration is brief or chronic. The amount to be administered may depend on a variety of factors such as the clinical symptoms, weight of the patient or subject, and whether other drugs are administered. The skilled artisan will recognize that the route of administration will vary depending on the disorder or condition to be treated.

[1574] Dosing frequency of the antibody may range from once every 3-6 months to weekly, biweekly (BIW) or daily dosing. Similarly, dose levels range from a low mg fixed dose (daily, weekly, biweekly, or monthly, depending on antibody) up to approximately 1 g doses. Dosing frequency depends on a variety of factors including the concentration and turnover rate of the target, biodistribution of the target, half-life of the antibodies, fragments or conjugates and potential pharmacodynamic effects that may enhance the biological effects of the antibodies, fragments, conjugates and pharmaceutical compositions beyond its presence in pharmacologically relevant levels.

[1575] In some embodiments, the anti-CCR8 antibody is administered with a dose of 1 mg/kg e.g. daily, weekly, q2w, q3w or q4w. In some embodiments, the anti-CCR8 antibody is administered with a dose of 1 to 30 mg/kg, preferably 5 to 10 mg/kg, e.g. daily, weekly, q2w, q3w or q4w. In some embodiments, the anti-CCR8 antibody is administered with a dose of 4 to 8 mg/kg, preferably 5 to 6 mg/kg, e.g. daily, weekly, q2w, q3w or q4w.

[1576] For the prevention or treatment of disease, the appropriate dosage of antibody will depend on the type of disease to be treated, the severity and course of the disease, whether the antibody is administered for preventive or therapeutic purposes, previous therapy, the subject's clinical history and response to the antibody variant, and the discretion of the attending physician or health veterinary professional. The antibody is suitably administered to the subject at one time or over a series of treatments.

[1577] As shown in example 12.4.2 it was surprisingly observed that even a single dose might be sufficient to establish a substantial treatment response. According to the current invention, there is therefore provided an anti-CCR8 antibody inducing ADCC and/or ADCP for use in the treatment of a tumor, wherein only a single dose of the anti-CCR8 antibody is administered to a subject, such that no further dose of the same or a different anti-CCR8 antibody is administered to the subject. Such a method is not only logistically superior and particularly convenient for patients but also avoids issues with patient compliance.

[1578] When administered intravenously, the pharmaceutical composition comprising the antibodies, fragments or conjugates can be administered by infusion over a period of about 0.5 to about 5 hours. In some embodiments, infusion may occur over a period of about 0.5 to about 2.5 hours, over a period of about 0.5 to about 2.0 hours, over a period of about 0.5 to about 1.5 hours, or over a period of about 1.5 hours, depending upon the antibodies, fragments, conjugates and pharmaceutical compositions being administered and the amount of antibody, fragment or conjugate being administered.

### Aspect 22—Second Med Use/Methods of Treatment

[1579] Treatment with an anti-CCR8 antibody according to the current invention showed remarkable efficacies in various syngeneic tumor models. In some cases, administration of an effective dose of the antibody or antigen-binding fragment to a group of diseased subjects leads to
[1580] a. a complete response in at least 15%, 20% or 25% of the subjects, and/or to
[1581] b. an overall response rate in at least 40%, 50%, 60% or 70% of the subjects.

[1582] According to a 22^{nd} aspect, there is provided the antibody or antigen binding fragment according to the 6^{th}, 7^{th}, 8^{th}, 9^{th}, 10^{th}, 11^{th}, 12^{th}, 13^{th}, 14^{th}, 15^{th}, 16^{th}, 17^{th} and/or 18^{th} aspect, or a conjugate according to the 19^{th} aspect or the pharmaceutical composition according to the 20^{th} aspect for use in the treatment of a tumor or a disease characterized by chemokine receptor positive cells, preferably CCR8 positive cells, such as CCR8 positive regulatory T cells. The treatment may occur as discussed for aspect 21.

[1583] Preferably, there is provided the antibody or antigen binding fragment according to the 6^{th}, 7^{th}, 8^{th}, 9^{th}, 10^{th}, 11^{th}, 12^{th}, 13^{th}, 14^{th}, 15^{th}, 16^{th}, 17^{th} and/or 18^{th} aspect, or a conjugate according to the 19^{th} aspect or the pharmaceutical composition according to the 20^{th} aspect for use in the treatment of a tumor or a disease characterized by the involvement of cells expressing the targeted seven transmembrane receptor or chemokine receptor.

[1584] Multiple modes of action can be envisioned for the antibodies, antigen-binding fragments or conjugates according to the current invention. One mode of action is the conjugation of an inventive anti-chemokine receptor antibody to a drug in the form of an antibody drug conjugate (ADC). Another mode of action is the ability of an antibody targeting a chemokine receptor to induce ADCC. A third mode of action resides in the ability of the antibody targeting chemokine receptor to induce ADCP.

[1585] The specific CCR8 antibodies or antigen binding fragments in particular according to the 8^{th}, 11^{th}, 12^{th}, 13^{th} and 14^{th} aspect, are particularly suited for an ADCC/ADCP based approach, e.g. because they are characterized by a particularly low internalization or are non-internalizing antibodies, thereby residing on the surface of the CCR8 expressing target cells and causing their efficient killing, as demonstrated for activated human Tregs in vitro (examples 10.3.3 ff, examples 10.3.4 ff) or in vivo (examples 12 ff). Regulatory T cells (Tregs) promote tumor growth by suppressing the function of effector T cells, including tumor responsive T cells in the tumor microenvironment. In fact, Tregs are one of the key resistance mechanisms hampering the efficacy of immune checkpoint inhibitors (ICIs) in many indications.

[1586] CCR8 is a surface receptor of the GPCR family of chemokine receptors, which is predominantly expressed on activated immune suppressive Tregs frequently found in tumors. Unlike other approaches directed against these suppressive T cells, targeting CCR8 offers the opportunity to deplete intra-tumoral Tregs without impacting resting Tregs or other immune cells systemically. Thus, targeting CCR8 may be superior in terms of both efficacy and safety. This mode of action can thus be used in tumors with intra-tumoral Tregs but can also be used in other diseases characterized by an aberrant presence of activated, i.e. CCR8 expressing Tregs.

### Specific Indications

[1587] In principle, the antibodies, fragments, conjugates and pharmaceutical compositions can be used in the treatment of any cancer involving CCR8 expressing cells. For example, the cancer may comprise tumor cells expressing CCR8, such as B cell lymphoma and T cell lymphoma. In the alternative, the cancer may comprise intra-tumoral Tregs expressing CCR8. As shown in example 11, CCR8 is upregulated in several tumor indications, such as T-cell acute lymphoblastic leukemia, breast cancer, triple-negative breast cancer, triple positive breast cancer, non-small cell lung cancer (NSCLC), small cell lung cancer (SCLC), testicular cancer, gastric cancer, head and neck squamous cell carcinoma, thymoma, esophageal adenocarcinoma, colorectal cancer, pancreatic adenocarcinoma, ovarian cancer or cervical cancer, acute myeloid leukemia, kidney cancer, bladder cancer, skin cancer, melanoma, thyroid cancer, mesothelioma, sarcoma and prostate cancer. According to some preferred embodiments, the use as a medicament is the use in the treatment of head and neck cancer, breast cancer, gastric cancer, lung cancer, squamous cell carcinoma, esophageal tumor, melanoma, bladder cancer, liver cancer, and/or prostate cancer.

[1588] According to some first embodiments according to the 22^{nd} aspect the tumor is selected from Adrenal cancer (e.g. Adrenocortical carcinoma or Pheochromocytoma), Bladder cancer (e.g. Transitional cell carcinoma, Transitional cell carcinoma-Papillary), Brain cancer (e.g. Glioma-Astrocytoma, Glioma-Astrocytoma-Glioblastoma, Glioma-Oligoastrocytoma, Glioma-Oligodendroglioma), Breast cancer (e.g. ADC, ADC-Ductal, ADC-Ductal-TNBC, ADC-Ductal-TPBC, ADC-Lobular), Colorectal cancer (e.g. ADC), Esophageal cancer (e.g. ADC), Esophageal cancer (e.g. SCC), Gastric cancer (e.g. ADC, ADC-Diffuse, ADC-Intestinal, ADC-Intestinal-Tubular), Head and Neck cancer (e.g. Laryngeal cancer-SCC, SCC, Oral cancer-SCC), Kidney cancer (e.g. ccRCC, Chromophobe, Papillary, Papillary-Type I, Papillary-Type II), Liver cancer (e.g. HCC), Lung cancer (e.g. NSCLC-ADC, NSCLC-ADC-Mixed, NSCLC-SCC, SCLC), Mesothelioma (e.g. Epithelioid), Ovarian cancer (e.g. ADC-Cystadenocarcinoma-Papillary serous), Pancreatic cancer (e.g. ADC-Ductal), Prostate cancer (e.g. ADC-Acinar type), Sarcoma (e.g. Leiomyosarcoma, Liposarcoma-Dedifferentiated, Malignant fibrous histiocytoma), Skin cancer (e.g. Melanoma), Testicular cancer (e.g. Germ cell tumor-Seminoma), Thymoma, Thyroid cancer (e.g. Follicular carcinoma, Papillary carcinoma-Classical variant), or Uterine cancer (e.g. Cervical-SCC, Cervical-SCC-Keratinizing, Cervical-SCC-Non-keratinizing, Endometrial-ADC-Endometrioid, Endometrial-ADC-Papillary serous, Endometrial-Carcinosarcoma-Malignant mixed mullerian tumor), B cell lymphoma and T cell lymphoma (cf. Table 11.1.2).

[1589] According to some second embodiments according to the 22^{nd} aspect the tumor is selected from T-cell acute lymphoblastic leukemia, breast cancer, triple-negative breast cancer, triple positive breast cancer, non-small cell lung cancer (NSCLC), small cell lung cancer (SCLC), testicular cancer, gastric cancer, head and neck squamous cell carcinoma, thymoma, esophageal adenocarcinoma, colorectal cancer, pancreatic adenocarcinoma, ovarian cancer or cervical cancer, acute myeloid leukemia, kidney cancer, bladder cancer, skin cancer, skin cancer, melanoma, thyroid cancer, mesothelioma, sarcoma and prostate cancer or any other cancer involving chemokine receptor or CCR8 expressing cells. Preferably the tumor is selected from head and neck cancer, breast cancer, gastric cancer, lung cancer, squamous cell carcinoma, esophageal tumor, melanoma, bladder cancer, liver cancer, and/or prostate cancer.

### Combination Treatment

[1590] According to some third embodiments according to the 22^{nd} aspect, which may be and are suggested to be combined with the embodiments of the first and/or second embodiments according to the 22^{nd} aspect, the use is a use in simultaneous, separate, or sequential combination with one or more further therapeutically active compounds. Examples for combination treatments are provided in examples 12.6, 12.6.1, 12.6.2, 12.6.3, 12.6.4, 12.6.5, 12.6.6, 12.6.7, 12.6.8 and 12.6.9, demonstrating the broad applicability of the anti-CCR8 antibodies according to the current invention and anti-CCR8 antibodies in general in combination treatment.

[1591] Anti-chemokine receptor antibodies, e.g. CCR8 antibodies, or ADCs, may be used adjunctive to, or with, other agents or treatments having anti-cancer properties. When used adjunctively, the antibodies, fragments or conjugates and other agent(s) may be formulated together in a single, combination pharmaceutical composition or formulation, as described for the 20^{th} aspect, or may be preferably formulated and administered separately, either on a single coordinated dosing regimen or on different dosing regimens.

### Sequential Administration: Combination Partner after Anti-CCR8 Antibody Treatment

[1592] It was found according to the current invention, that administration of the anti-CCR8 antibody as a first agent and administration of the one or more further therapeutically active compounds thereafter increased the efficacy in an unforeseen way.

[1593] According to a preferred treatment scheme, treatment starts with administration of the anti-CCR8 antibody (e.g. daily, weekly, q2w, q3w or q4w as described above), optionally followed by administration of the one or more further therapeutically active compounds. As described in examples 12.6 ff., starting the administration of the second therapeutic agent or therapy after the initial dose of anti-CCR8 antibody was associated with further improved efficacy. Without being bound by theory, the time between the initial doses should be chosen to allow for an intra-tumoral Treg depletion of at least 30% 40%, 50%, or 60%. The one or more further therapeutically active compounds or combination partner is suggested to be any of those described herein for this purpose. For example, the one or more further therapeutically active compounds may comprise a checkpoint inhibitor (e.g. anti-PD1/anti-PD-L1/anti-CTLA4 antibody), an antibody targeting a protein which is specifically expressed by the tumor cells, or a chemotherapeutic agent described herein.

[1594] In a different embodiment, treatment starts with the administration of a chemotherapeutic agent and is followed by administration of the anti-CCR8 antibody (e.g. weekly or biweekly schedule).

### Further Therapeutically Active Compounds for Combination Treatment

[1595] Agents administered adjunctively with an anti-chemokine receptor antibody or ADC, e.g. with an anti-CCR8 antibody or ADC, may have complementary activities to the anti-chemokine receptor antibody or ADC, such that the antibodies/ADCs and other agents do not adversely affect each other. Agents that may be used adjunctively with the anti-chemokine receptor or anti-CCR8 antibodies or ADCs according to the current invention can be alkylating agents, angiogenesis inhibitors, antibodies, antimetabolites, antimitotics, antiproliferatives, antivirals, aurora kinase inhibitors, apoptosis promoters (for example, Bcl-2 family inhibitors), activators of death receptor pathway, Bcr-Abl kinase inhibitors, BiTE (Bi-Specific T cell Engager) antibodies, antibody drug conjugates, biologic response modifiers, cyclin-dependent kinase inhibitors, cell cycle inhibitors, cyclooxygenase-2 inhibitors, DVDs, leukemia viral oncogene homolog (ErbB2) receptor inhibitors, growth factor inhibitors, heat shock protein (HSP)-90 inhibitors, histone deacetylase (HDAC) inhibitors, hormonal therapies, immunologicals, inhibitors of inhibitors of apoptosis proteins (IAPs), intercalating antibiotics, kinase inhibitors, kinesin inhibitors, Jak2 inhibitors, mammalian target of rapamycin inhibitors, microRNAs, mitogen-activated extracellular signal-regulated kinase inhibitors, multivalent binding proteins, non-steroidal anti-inflammatory drugs (NSAIDs), poly ADP (adenosine diphosphate)-ribose polymerase (PARP) inhibitors, platinum chemotherapeutics, polo-like kinase (Plk) inhibitors, phosphoinositide-3 kinase (PI3K) inhibitors, proteasome inhibitors, purine analogs, pyrimidine analogs, receptor tyrosine kinase inhibitors, retinoids/deltoids plant alkaloids, small inhibitory ribonucleic acids (siRNAs), topoisomerase inhibitors, ubiquitin ligase inhibitors, and the like, as well as combinations of one or more of these agents.

[1596] According to some highly preferred embodiments of the third embodiments of the 22^{nd} aspect, there is provided the antibody or antigen binding fragment according to the 6^{th}, 7^{th}, 8^{th}, 9^{th}, 10^{th}, 11^{th}, 12^{th}, 13^{th}, 14^{th}, 15^{th}, 16^{th}, 17^{th} and/or 18^{th} aspect, or a conjugate according to the 19^{th} aspect or the pharmaceutical composition according to the 20^{th} aspect for use in simultaneous, separate, or sequential combination

(i) with one or more further therapeutically active compounds, preferably selected from
[1597] a) an antibody or a small molecule targeting a checkpoint protein, such as PD1, PD-L1 or CTLA-4,
[1598] b) an antibody targeting a further chemokine receptor, such as CCR1, CCR2, CCR3, CCR4, CCR5, CCR6, CCR7, CCR8, CCR9, CCR10, CXCR1, CXCR2, CXCR3, CXCR4, CXCR5, CXCR6, CX3CR1 or CXCR1,
[1599] c) an antibody targeting a protein which is specifically expressed by the tumor cells,
[1600] d) an antibody or a small molecule targeting HER2 and/or EGFR,
[1601] e) the standard of care for any of head and neck cancer, breast cancer, gastric cancer, lung cancer, squamous cell carcinoma, esophageal tumor, melanoma, bladder cancer, liver cancer, and/or prostate cancer, and/or
[1602] f) a chemotherapeutic agent, preferably a taxane, paclitaxel, doxorubicin, cis-platin, carboplatin, oxaliplatin or gemcitabine,
[1603] g) a targeted kinase inhibitor, such as Sorafinib, Regorafenib, or MEKi-1, and/or
   (ii) with radiation therapy, and or
   (iii) with depletion of intra-tumoral B cells,
   e.g. in the treatment of a tumor or a disease, preferably characterized by chemokine receptor positive cells, such as CCR8 positive cells, such as CCR8 positive regulatory T cells.

[1604] Suitable taxanes may be selected e.g. from paclitaxel, abraxane, cabazitaxel, or docetaxel, or derivatives thereof.

[1605] Embodiments wherein the anti-CCR8 antibody is combined with doxorubicin, taxanes, cis-platin or carboplatin, embodiments wherein the anti-CCR8 antibody is combined with trastuzumab or pertuzumab and embodiments wherein the anti-CCR8 antibody is combined with a PD-L1 antibody such as atezolizumab are particularly suitable for the treatment of breast cancer, such as stage IV breast cancer. Embodiments wherein the anti-CCR8 antibody is combined with cis-/carboplatin, paclitaxel, docetaxel or gemcitabine, embodiments wherein the anti-CCR8 antibody is combined with avastin, EGFR inhibitor (such as Tarceva or Iressa), ALK inhibitor, ROS inhibitor, BRAF inhibitor or NTRK inhibitor, and embodiments wherein the anti-CCR8 antibody is combined with nivolumab, pembrolizumab or atezolizumab, or a derivative of any of these, are particularly suitable for the treatment of NSCLC. Embodiments wherein the anti-CCR8 antibody is combined with nivolumab, pembrolizumab or ipilimumab (CTLA4), anti IL2 antibody or a derivative of any of these, embodiments wherein the anti-CCR8 antibody is combined with BRAF inhibitor or MEK inhibitor and embodiments wherein the anti-CCR8 antibody is combined with darcabazine, paclitaxel, carboplatin, or cis-platin are particularly suitable for the treatment of melanoma.

### Combination with Checkpoint Inhibitors

[1606] Tumors were found to be particularly responsive to anti-CCR8 antibody therapy, if the tumor was responsive to immune checkpoint inhibition, or if the tumor showed high or medium immune infiltration and if substantial numbers of CD8+ T cells and/or NK cells were present or could be induced, e.g. in addition to high CCR8/FoxP3 ratios (cf. example 12.6 ff, cf. responsive syngeneic models).

[1607] According to some particularly preferred embodiments A of the third embodiments according to the 22^{nd} aspect, the one or more further therapeutically active compounds comprise(s) an antibody or a small molecule targeting a checkpoint protein, such as PD1, PD-L1 or CTLA-4. Suitable checkpoint targeting antibodies include Nivolumab (PD1; Human IgG4), Pembrolizumab (PD1; Humanized IgG4), Atezolizumab (PD-L1; Humanized IgG1), Avelumab (PD-L1; Human IgG1), Durvalumab (PD-L1; Human IgG1), Cemiplimab, cemiplimab-rwlc (PD-1; Human mAb), Dostarlimab (TSR-042) (PD-1; Humanized IgG4), or Ipilimumab (CTLA-4; Human IgG1). In some embodiments, the antibody or small molecule targeting a checkpoint protein targets and/or inhibits a checkpoint protein which may be CTLA-4, PDL1, PDL2, PD1, B7-H3, B7-H4, BTLA, HVEM, TIM3, GALS, LAG3, VISTA, KIR, 2B4, CD160, CGEN-15049, CHK 1, CHK2, A2aR, B-7 family ligands or a combination thereof. Examples 12.6 ff. show a superior therapeutic effect obtained by combination of an antibody targeting checkpoint protein PD-L1 and an inventive antibody according to the 6^{th}, 7^{th}, 8^{th}, 9^{th}, 10^{th}, 11^{th}, 12^{th}, 13^{th}, 14^{th}, 15^{th}, 16^{th}, 17^{th} and/or 18^{th} aspect. Examples 12.6 ff. demonstrate that combination of an inventive antibody according to the 6^{th}, 7^{th}, 8^{th}, 9^{th}, 10^{th}, 11^{th}, 12^{th}, 13^{th}, 14^{th}, 15^{th}, 16^{th}, 17^{th} and/or 18^{th} aspect and an antibody targeting checkpoint protein CTLA4 showed likewise excellent efficacy in a tumor model.

### Combination with Chemokine Receptor Antibodies

[1608] According to some preferred embodiments B of the third embodiments according to the 22^{nd} aspect, the one or more further therapeutically active compounds comprise(s) an antibody targeting a further chemokine receptor, such as CCR1, CCR2, CCR3, CCR4, CCR5, CCR6, CCR7, CCR8, CCR9, CCR10, CXCR1, CXCR2, CXCR3, CXCR4, CXCR5, CXCR6, CX3CR1 or CXCR1. Suitable antibodies targeting a further chemokine receptor include the antibodies provided according to the 6^{th} aspect, e.g. a CCR5 antibody, CXCR5 antibody, CCR4 antibody, or Mogamulizumab.

### Combination with HER2 or EGFR Targeting Antibodies or Molecules

[1609] According to some preferred embodiments C of the third embodiments according to the 22^{nd} aspect, the one or more further therapeutically active compounds comprise(s) a small molecule or an antibody targeting HER2 and/or EGFR. Suitable antibodies targeting HER2 are Trastuzumab (HER2; Humanized IgG1), Pertuzumab (HER2; humanized IgG1), Ado-trastuzumab emtansine (HER2; humanized IgG1; ADC), [fam-]trastuzumab deruxtecan, fam-trastuzumab deruxtecan-nxki (HER2; Humanized IgG1 ADC), Sacituzumab govitecan; sacituzumab govitecan-hziy (TROP-2; Humanized IgG1 ADC) and/or Margetuximab (HER2; Chimeric IgG1). Suitable antibodies targeting EGFR are Cetuximab (EGFR; Chimeric IgG1), Panitumumab (EGFR; Human IgG2), and Necitumumab (EGFR; Human IgG1).

### Combination with Therapeutic Antibodies

[1610] According to some embodiments D of the third embodiments according to the 22^{nd} aspect, the one or more further therapeutically active compounds comprise(s) a further therapeutic antibody selected from Muromonab-CD3 (CD3; Murine IgG2a), Efalizumab (CD11a; Humanized IgG1), Tositumomab-I131 (CD20; Murine IgG2a), Nebacumab (Endotoxin; Human IgM), Edrecolomab (EpCAM; Murine IgG2a), Catumaxomab (EPCAM/CD3; Rat/mouse bispecific mAb), Daclizumab (IL-2R; Humanized IgG1), Abciximab (GPIIb/IIIa; Chimeric IgG1 Fab), Rituximab (CD20; Chimeric IgG1), Basiliximab (IL-2R; Chimeric IgG1), Palivizumab (RSV; Humanized IgG1), Infliximab (TNF; Chimeric IgG1), Trastuzumab (HER2; Humanized IgG1), Adalimumab (TNF; Human IgG1), Ibritumomab tiuxetan (CD20; Murine IgG1), Omalizumab (IgE; Humanized IgG1), Cetuximab (EGFR; Chimeric IgG1), Bevacizumab (VEGF; Humanized IgG1), Natalizumab (a4 integrin; Humanized IgG4), Panitumumab (EGFR; Human IgG2), Ranibizumab (VEGF; Humanized IgG1 Fab), Eculizumab (C5; Humanized IgG2/4), Certolizumab pegol (TNF; Humanized Fab, pegylated), Ustekinumab (IL-12/23; Human IgG1), Canakinumab (IL-1β; Human IgG1), Golimumab (TNF; Human IgG1), Ofatumumab (CD20; Human IgG1), Tocilizumab (IL-6R; Humanized IgG1), Denosumab (RANK-L; Human IgG2), Belimumab (BLyS; Human IgG1), Ipilimumab (CTLA-4; Human IgG1), Brentuximab vedotin (CD30; Chimeric IgG1; ADC), Pertuzumab (HER2; humanized IgG1), Ado-trastuzumab emtansine (HER2; humanized IgG1; ADC), Raxibacumab (B. anthrasis PA; Human IgG1), Obinutuzumab (CD20; Humanized IgG1 Glycoengineered), Siltuximab (IL-6; Chimeric IgG1), Ramucirumab (VEGFR2; Human IgG1), Vedolizumab (α4β7 integrin; humanized IgG1), Nivolumab (PD1; Human IgG4), Pembrolizumab (PD1; Humanized IgG4), Blinatumomab (CD19, CD3; Murine bispecific tandem scFv), Alemtuzumab (CD52; Humanized IgG1), Evolocumab (PCSK9; Human IgG2), Idarucizumab (Dabigatran; Humanized Fab), Necitumumab (EGFR; Human IgG1), Dinutuximab (GD2; Chimeric IgG1), Secukinumab (IL-17a; Human IgG1), Mepolizumab (IL-5; Humanized IgG1), Alirocumab (PCSK9; Human IgG1), Daratumumab (CD38; Human IgG1), Elotuzumab (SLAMF7; Humanized IgG1), Ixekizumab (IL-17a; Humanized IgG4), Reslizumab (IL-5; Humanized IgG4), Olaratumab (PDGFRα; Human IgG1), Bezlotoxumab (Clostridium difficile enterotoxin B; Human IgG1), Atezolizumab (PD-L1; Humanized IgG1), Obiltoxaximab (B. anthrasis PA; Chimeric IgG1), Brodalumab (IL-17R; Human IgG2), Dupilumab (IL-4R α; Human IgG4), Inotuzumab ozogamicin (CD22; Humanized IgG4; ADC), Guselkumab (IL-23 p19; Human IgG1), Sarilumab (IL-6R; Human IgG1), Avelumab (PD-L1; Human IgG1), Emicizumab (Factor Ixa, X; Humanized IgG4, bispecific), Ocrelizumab (CD20; Humanized IgG1), Benralizumab (IL-5R α; Humanized IgG1), Durvalumab (PD-L1; Human IgG1), Gemtuzumab ozogamicin (CD33; Humanized IgG4; ADC), Erenumab, erenumab-aooe (CGRP receptor; Human IgG2), Galcanezumab, galcanezumab-gnlm (CGRP; Humanized IgG4), Burosumab, burosumab-twza (FGF23; Human IgG1), Lanadelumab, lanadelumab-flyo (Plasma kallikrelin; Human IgG1), Mogamulizumab, mogamulizumab-kpkc (CCR4; Humanized IgG1), Tildrakizumab; tildrakizumab-asmn (IL-23 p19; Humanized IgG1), Fremanezumab, fremanezumab-vfrm (CGRP; Humanized IgG2), Ravulizumab, ravulizumab-cwvz (C5; Humanized IgG2/4), Cemiplimab, cemiplimab-rwlc (PD-1; Human mAb), Ibalizumab, ibalizumab-uiyk (CD4; Humanized IgG4), Emapalumab, emapalumab-lzsg (IFNg; Human IgG1), Moxetumomab pasudotox, moxetumomab pasudotox-tdfk (CD22; Murine IgG1 dsFv immunotoxin), Caplacizumab, caplacizumab-yhdp (von Willebrand factor; Humanized Nanobody), Risankizumab, risankizumab-rzaa (IL-23 p19; Humanized IgG1), Polatuzumab vedotin, polatuzumab vedotin-piiq (CD79b; Humanized IgG1 ADC), Romosozumab, romosozumab-aqqg (Sclerostin; Humanized IgG2), Brolucizumab, brolucizumab-dbll (VEGF-A; Humanized scFv), Crizanlizumab; crizanlizumab-tmca (CD62 (aka P-selectin); Humanized IgG2), Enfortumab vedotin, enfortumab vedotin-ejfv (Nectin-4; Human IgG1 ADC), [fam-]trastuzumab deruxtecan, fam-trastuzumab deruxtecan-nxki (HER2; Humanized IgG1 ADC), Teprotumumab, teprotumumab-trbw (IGF-1R; Human IgG1), Eptinezumab, eptinezumab-jjmr (CGRP; Humanized IgG1), Isatuximab, isatuximab-irfc (CD38; Chimeric IgG1), Sacituzumab govitecan; sacituzumab govitecan-hziy (TROP-2; Humanized IgG1 ADC), Inebilizumab (CD19; Humanized IgG1), Leronlimab (CCR5; Humanized IgG4), Satralizumab (IL-6R; Humanized IgG2), Narsoplimab (MASP-2, Human IgG4), Tafasitamab (CD19; Humanized IgG1), REGNEB3 (Ebola virus; mixture of 3 human IgG1), Naxitamab (GD2; Humanized IgG1), Oportuzumab monatox (EpCAM; Humanized scFv immunotoxin), Belantamab mafodotin (B-cell maturation antigen; Humanized IgG1 ADC), Margetuximab (HER2; Chimeric IgG1), Tanezumab (Nerve growth factor; Humanized IgG2), Dostarlimab (TSR-042) (PD-1; Humanized IgG4), Teplizumab (CD3; Humanized IgG1), Aducanumab (Amyloid beta; Human IgG1), Sutimlimab (BIVV009) (C1s; Humanized IgG4), Evinacumab (Angiopoietin-like 3; Human IgG4).

[1611] The combination treatment with any of these further therapeutic antibodies is preferred in particular for a tumor specifically expressing the target of the selected further therapeutic antibody.

[1612] According to some embodiments E of the third embodiments according to the 22^{nd} aspect, the one or more further therapeutically active compounds comprise(s) a further therapeutic antibody targeting CD16a, ILDR2, PSMA or Mesothelin.

### Combination with Cytotoxic or Cytostatic Agents

[1613] Several chemotherapeutics such as doxorubicin and oxaliplatin induce immunogenic cell death (ICD). ICD however was found to be related to the response to anti-CCR8 antibodies, such that a combination therapy can add further benefit to the application of monotherapy.

[1614] According to some embodiments F of the third embodiments according to the 22^{nd} aspect, the one or more further therapeutically active compounds comprise(s) a cytostatic agent selected from radionuclides, alkylating agents, DNA cross-linking agents, DNA intercalating agents (e.g., groove binding agents such as minor groove binders), cell cycle modulators, apoptosis regulators, kinase inhibitors, protein synthesis inhibitors, mitochondria inhibitors, nuclear export inhibitors, topoisomerase I inhibitors, topoisomerase II inhibitors, RNA/DNA antimetabolites and antimitotic agents.

### Alkylating Agent

[1615] According to some embodiments F1 of the third embodiments according to the 22^{nd} aspect, the one or more further therapeutically active compounds comprise(s) an alkylating agent selected from asaley (L-Leucine, N-[N-acetyl-4-[bis-(2-chloroethyl)amino]-DL-phenylalanyl]-, ethylester); AZQ (1,4-cyclohexadiene-1,4-dicarbamic acid, 2, 5-bis(1-aziridinyl)-3,6-dioxo-, diethyl ester); BCNU (N,N′-Bis(2-chloroethyl)-N-nitrosourea); busulfan (1,4-butanediol dimethanesulfonate); (carboxyphthalato)platinum; CBDCA (cis-(1,1-cyclobutanedicarboxylato)diammineplatinum(II))); CCNU (N-(2-chloroethyl)-N′-cyclohexyl-N-nitrosourea); CHIP (iproplatin; NSC 256927); chlorambucil; chlorozotocin (2-[[[(2-chloroethyl) nitrosoamino]carbonyl]amino]-2-deoxy-D-glucopyranose); cis-platinum (cisplatin); clomesone; cyanomorpholinodoxorubicin; cyclodisone; dianhydrogalactitol (5,6-diepoxydulcitol); fluorodopan ((5-[(2-chloroethyl)-(2-fluoroethyl)amino]-6-methyl-uracil); hepsulfam; hycanthone; indolinobenzodiazepine dimer DGN462; melphalan; methyl CCNU ((1-(2-chloroethyl)-3-(trans-4-methylcyclohexane)-1-nitrosourea); mitomycin C; mitozolamide; nitrogen mustard ((bis(2-chloroethyl) methylamine hydrochloride); PCNU ((1-(2-chloroethyl)-3-(2,6-dioxo-3-piperidyl)-1-nitrosourea)); piperazine alkylator ((1-(2-chloroethyl)-4-(3-chloropropyl)-piperazine dihydrochloride)); piperazinedione; pipobroman (N,N′-bis(3-bromopropionyl) piperazine); porfiromycin (N-methylmitomycin C); spirohydantoin mustard; teroxirone (triglycidylisocyanurate); tetraplatin; thio-tepa (N,N,N″-tri-1,2-ethanediylthio phosphoramide); triethylenemelamine; uracil nitrogen mustard (desmethyldopan); Yoshi-864 ((bis(3-mesyloxy propyl)amine hydrochloride).

### DNA Alkylating-Like Agent

[1616] According to some embodiments F2 of the third embodiments according to the 22^{nd} aspect, the one or more further therapeutically active compounds comprise(s) an DNA alkylating-like agent selected from Cisplatin; Carboplatin; Nedaplatin; Oxaliplatin; Satraplatin; Triplatin tetranitrate; Procarbazine; altretamine; dacarbazine; mitozolomide; temozolomide.

### Alkylating Antineoplastic Agent

[1617] According to some embodiments F3 of the third embodiments according to the 22^{nd} aspect, the one or more further therapeutically active compounds comprise(s) an alkylating antineoplastic agent selected from Carboquone; Carmustine; Chlornaphazine; Chlorozotocin; Duocarmycin; Evofosfamide; Fotemustine; Glufosfamide; Lomustine; Mannosulfan; Nimustine; Phenanthriplatin; Pipobroman; Ranimustine; Semustine; Streptozotocin; ThioTEPA; Treosulfan; Triaziquone; Triethylenemelamine; Triplatin tetranitrate.

### DNA Replication and Repair Inhibitor

[1618] According to some embodiments F4 of the third embodiments according to the 22^{nd} aspect, the one or more further therapeutically active compounds comprise(s) a DNA replication and repair inhibitor selected from Altretamine; Bleomycin; Dacarbazine; Dactinomycin; Mitobronitol; Mitomycin; Pingyangmycin; Plicamycin; Procarbazine; Temozolomide; ABT-888 (veliparib); olaparib; KU-59436; AZD-2281; AG-014699; BSI-201; BGP-15; INO-1001; ONO-2231.

### Cell Cycle Modulator

[1619] According to some embodiments F5 of the third embodiments according to the 22^{nd} aspect, the one or more further therapeutically active compounds comprise(s) a cell cycle modulator, such as Paclitaxel; Nab-Paclitaxel; Docetaxel; Vincristine; Vinblastine; ABT-348; AZD-1152; MLN-8054; VX-680; Aurora A-specific kinase inhibitors; Aurora B-specific kinase inhibitors and pan-Aurora kinase inhibitors; AZD-5438; BMI-1040; BMS-032; BMS-387; CVT-2584; flavopyridol; GPC-286199; MCS-5A; PD0332991; PHA-690509; seliciclib (CYC-202, R-roscovitine); ZK-304709; AZD4877, ARRY-520: GSK923295A.

### Apoptosis Regulator

[1620] According to some embodiments F6 of the third embodiments according to the 22^{nd} aspect, the one or more further therapeutically active compounds comprise(s) an apoptosis regulator such as AT-101 ((−)gossypol); G3139 or oblimersen (Bcl-2-targeting antisense oligonucleotide); IPI-194; IPI-565; N-(4-(4-((4′-chloro(1,1-biphenyl)-2-yl)methyl)piperazin-1-ylbenzoyl)-4-(((1R)-3-(dimethylamino)-1-((phenylsulfanyl)methyl)propyl)amino)-3-nitrobenzenesulfonamide); N-(4-(4-((2-(4-chlorophenyl)-5,5-dimethyl-1-cyclohex-1-en-1-yl)methyl)piperazin-1-yl)benzoyl)-4-(((1R)-3-(morpholin-4-yl)-1-((phenylsulfanyl)methyl)propyl)amino)-3-((trifluoromethyl)sulfonyl)benzenesulfonamide; GX-070 (Obatoclax®; 1H-Indole, 2-(2-((3,5-dimethyl-1H-pyrrol-2-yl)methylene)-3-methoxy-2H-pyrrol-5-yl)-)); HGS1029; GDC-0145; GDC-0152; LCL-161; LBW-242; venetoclax; agents that target TRAIL or death receptors (e.g., DR4 and DR5) such as ETR2-ST01, GDC0145, HGS-1029, LBY-135, PRO-1762; drugs that target caspases, caspase-regulators, BCL-2 family members, death domain proteins, TNF family members, Toll family members, and/or NF-kappa-B proteins.

### Angiogenesis Inhibitor

[1621] According to some embodiments F7 of the third embodiments according to the 22^{nd} aspect, the one or more further therapeutically active compounds comprise(s) an angiogenesis inhibitor such as ABT-869; AEE-788; axitinib (AG-13736); AZD-2171; CP-547,632; IM-862; pegaptamib; sorafenib; BAY43-9006; pazopanib (GW-786034); vatalanib (PTK-787, ZK-222584); sunitinib; SU-11248; VEGF trap; vandetanib; ABT-165; ZD-6474; DLL4 inhibitors.

### Proteasome Inhibitor

[1622] According to some embodiments F8 of the third embodiments according to the 22^{nd} aspect, the one or more further therapeutically active compounds comprise(s) a proteasome inhibitor such as Bortezomib; Carfilzomib; Epoxomicin; Ixazomib; Salinosporamide A.

### Kinase Inhibitor

[1623] According to some embodiments F9 of the third embodiments according to the 22^{nd} aspect, the one or more further therapeutically active compounds comprise(s) a kinase inhibitor such as Afatinib; Axitinib; Bosutinib; Crizotinib; Dasatinib; Erlotinib; Fostamatinib; Gefitinib; Ibrutinib; Imatinib; Lapatinib; Lenvatinib; Mubritinib; Nilotinib; Pazopanib; Pegaptanib; Sorafenib; Sunitinib; SU6656; Vandetanib; Vemurafenib; CEP-701 (lesaurtinib); XL019; INCB018424 (ruxolitinib); ARRY-142886 (selemetinib); ARRY-438162 (binimetinib); PD-325901; PD-98059; AP-23573; CCI-779; everolimus; RAD-001; rapamycin; temsirolimus; ATP-competitive TORC1/TORC2 inhibitors including PI-103, PP242, PP30, Torin 1; LY294002; XL-147; CAL-120; ONC-21; AEZS-127; ETP-45658; PX-866; GDC-0941; BGT226; BEZ235; XL765, Regorafenib, and MEKi-1.

### Protein Synthesis Inhibitor

[1624] According to some embodiments F10 of the third embodiments according to the 22^{nd} aspect, the one or more further therapeutically active compounds comprise(s) a protein synthesis inhibitor such as Streptomycin; Dihydrostreptomycin; Neomycin; Framycetin; Paromomycin; Ribostamycin; Kanamycin; Amikacin; Arbekacin; Bekanamycin; Dibekacin; Tobramycin; Spectinomycin; Hygromycin B; Paromomycin; Gentamicin; Netilmicin; Sisomicin; Isepamicin; Verdamicin; Astromicin; Tetracycline; Doxycycline; Chlortetracycline; Clomocycline; Demeclocycline; Lymecycline; Meclocycline; Metacycline; Minocycline; Oxytetracycline; Penimepicycline; Rolitetracycline; Tetracycline; Glycylcyclines; Tigecycline; Oxazolidinone; Eperezolid; Linezolid; Posizolid; Radezolid; Ranbezolid; Sutezolid; Tedizolid; Peptidyl transferase inhibitors; Chloramphenicol; Azidamfenicol; Thiamphenicol; Florfenicol; Pleuromutilins; Retapamulin; Tiamulin; Valnemulin; Azithromycin; Clarithromycin; Dirithromycin; Erythromycin; Flurithromycin; Josamycin; Midecamycin; Miocamycin; Oleandomycin; Rokitamycin; Roxithromycin; Spiramycin; Troleandomycin; Tylosin; Ketolides; Telithromycin; Cethromycin; Solithromycin; Clindamycin; Lincomycin; Pirlimycin; Streptogramins; Pristinamycin; Quinupristin/dalfopristin; Virginiamycin.

### Histone Deacetylase Inhibitor

[1625] According to some embodiments F11 of the third embodiments according to the 22^{nd} aspect, the one or more further therapeutically active compounds comprise(s) a histone deacetylase inhibitor such as Vorinostat; Romidepsin; Chidamide; Panobinostat; Valproic acid; Belinostat; Mocetinostat; Abexinostat; Entinostat; SB939 (pracinostat); Resminostat; Givinostat; Quisinostat; thioureidobutyronitrile (Kevetrin™); CUDC-10; CHR-2845 (tefinostat); CHR-3996; 4SC-202; CG200745; ACY-1215 (rocilinostat); ME-344; sulforaphane.

### Topoisomerase I Inhibitor

[1626] According to some embodiments F12 of the third embodiments according to the 22^{nd} aspect, the one or more further therapeutically active compounds comprise(s) a topoisomerase I inhibitor such as camptothecin; various camptothecin derivatives and analogs (for example, NSC 100880, NSC 603071, NSC 107124, NSC 643833, NSC 629971, NSC 295500, NSC 249910, NSC 606985, NSC 74028, NSC 176323, NSC 295501, NSC 606172, NSC 606173, NSC 610458, NSC 618939, NSC 610457, NSC 610459, NSC 606499, NSC 610456, NSC 364830, and NSC 606497); morpholinisoxorubicin; SN-38.

### Topoisomerase II Inhibitor

[1627] According to some embodiments F13 of the third embodiments according to the 22^{nd} aspect, the one or more further therapeutically active compounds comprise(s) a topoisomerase II inhibitor such as doxorubicin; amonafide (benzisoquinolinedione); m-AMSA (4′-(9-acridinylamino)-3′-methoxymethanesulfonanilide); anthrapyrazole derivative ((NSC 355644); etoposide (VP-16); pyrazoloacridine ((pyrazolo[3,4,5-kl]acridine-2(6H)-propanamine, 9-methoxy-N, N-dimethyl-5-nitro-, monomethanesulfonate); bisantrene hydrochloride; daunorubicin; deoxydoxorubicin; mitoxantrone; menogaril; N,N-dibenzyl daunomycin; oxanthrazole; rubidazone; teniposide.

### DNA Intercalating Agent

[1628] According to some embodiments F14 of the third embodiments according to the 22^{nd} aspect, the one or more further therapeutically active compounds comprise(s) a DNA intercalating agent such as anthramycin; chicamycin A; tomaymycin; DC-81; sibiromycin; pyrrolobenzodiazepine derivative; SGD-1882 ((S)-2-(4-aminophenyl)-7-methoxy-8-(3 S)-7-methoxy-2-(4-methoxyphenyl)-5-oxo-5,11a-dihydro-1H-benzo[e]pyrrolo[1,2-a][1,4]diazepin-8-yl)oxy)propoxy)-1H-benzo[e]pyrrolo[1,2-a][1,4]diazepin-5(11aH)-one); SG2000 (SJG-136; (11aS,11a′S)-8,8′-(propane-1,3-diylbis(oxy))bis(7-methoxy-2-methylene-2,3-dihydro-1H-benzo[e]pyrrolo[1,2-a][1,4]diazepin-5(11aH)-one)).

### RNA/DNA Antimetabolite

[1629] According to some embodiments F15 of the third embodiments according to the 22^{nd} aspect, the one or more further therapeutically active compounds comprise(s) a RNA/DNA antimetabolite such as gemcitabine, L-alanosine; 5-azacytidine; 5-fluorouracil; acivicin; aminopterin derivative N-[2-chloro-5[[(2, 4-diamino-5-methyl-6-quinazolinyl)methyl]amino]benzoyl]L-aspartic acid (NSC 132483); aminopterin derivative N-[4-[[(2, 4-diamino-5-ethyl-6-quinazolinyl)methyl]amino]benzoyl]L-aspartic acid; aminopterin derivative N-[2-chloro-4-[[(2, 4-diamino-6-pteridinyl)methyl]amino]benzoyl]L-aspartic acid monohydrate; antifolate PT523 ((Nα-(4-amino-4-deoxypteroyl)-Nγ-hemiphthaloyl-L-ornithine)); Baker's soluble antifol (NSC 139105); dichlorallyl lawsone ((2-(3, 3-dichloroallyl)-3-hydroxy-1,4-naphthoquinone); brequinar; ftorafur ((pro-drug; 5-fluoro-1-(tetrahydro-2-furyl)-uracil); 5,6-dihydro-5-azacytidine; methotrexate; methotrexate derivative (N-[[4-[[(2, 4-diamino-6-pteridinyl)methyl]methylamino]-1-naphthalenyl]carbonyl]L-glutamic acid); PALA ((N-(phosphonoacetyl)-L-aspartate); pyrazofurin; trimetrexate.

### DNA Antimetabolite

[1630] According to some embodiments F16 of the third embodiments according to the 22^{nd} aspect, the one or more further therapeutically active compounds comprise(s) a DNA antimetabolite such as 3-HP; 2′-deoxy-5-fluorouridine; 5-HP; α-TGDR (α-2′-deoxy-6-thioguanosine); aphidicolin glycinate; ara C (cytosine arabinoside); 5-aza-2′-deoxycytidine; β-TGDR (β-2′-deoxy-6-thioguanosine); cyclocytidine; guanazole; hydroxyurea; inosine glycodialdehyde; macbecin II; pyrazoloimidazole; thioguanine; thiopurine.

### Mitochondria Inhibitor

[1631] According to some embodiments F17 of the third embodiments according to the 22^{nd} aspect, the one or more further therapeutically active compounds comprise(s) a mitochondria inhibitor such as pancratistatin; phenpanstatin; rhodamine-123; edelfosine; d-alpha-tocopherol succinate; compound 11β; aspirin; ellipticine; berberine; cerulenin; GX015-070 (Obatoclax®; 1H-Indole, 2-(2-((3,5-dimethyl-1H-pyrrol-2-yl)methylene)-3-methoxy-2H-pyrrol-5-yl)-); celastrol (tripterine); metformin; Brilliant green; ME-344.

### Antimitotic Agent

[1632] According to some embodiments F18 of the third embodiments according to the 22^{nd} aspect, the one or more further therapeutically active compounds comprise(s) an antimitotic agent such as allocolchicine; auristatins, such as MMAE (monomethyl auristatin E) and MMAF (monomethyl auristatin F); halichondrin B; cemadotin; colchicine; cholchicine derivative (N-benzoyl-deacetyl benzamide); dolastatin-10; dolastatin-15; maytansine; maytansinoids, such as DM1 (N2′-deacetyl-N2′-(3-mercapto-1-oxopropyl)-maytansine); rhozoxin; paclitaxel; paclitaxel derivative ((2′-N-[3-(dimethylamino)propyl]glutaramate paclitaxel); docetaxel; thiocolchicine; trityl cysteine; vinblastine sulfate; vincristine sulfate.

### Nuclear Export Inhibitor

[1633] According to some embodiments F19 of the third embodiments according to the 22^{nd} aspect, the one or more further therapeutically active compounds comprise(s) a nuclear export inhibitor such as callystatin A; delactonmycin; KPT-185 (propan-2-yl (Z)-3-[3-[3-methoxy-5-(trifluoromethyl)phenyl]-1,2,4-triazol-1-yl]prop-2-enoate); kazusamycin A; leptolstatin; leptofuranin A; leptomycin B; ratjadone; Verdinexor ((Z)-3-[3-[3,5-bis(trifluoromethyl)phenyl]-1,2,4-triazol-1-yl]-N-pyridin-2-ylprop-2-enehydrazide).

### Hormonal Therapeutics

[1634] According to some embodiments F20 of the third embodiments according to the 22^{nd} aspect, the one or more further therapeutically active compounds comprise(s) a hormonal therapeutics such as anastrozole; exemestane; arzoxifene; bicalutamide; cetrorelix; degarelix; deslorelin; trilostane; dexamethasone; flutamide; raloxifene; fadrozole; toremifene; fulvestrant; letrozole; formestane; glucocorticoids; doxercalciferol; sevelamer carbonate; lasofoxifene; leuprolide acetate; megesterol; mifepristone; nilutamide; tamoxifen citrate; abarelix; prednisone; finasteride; rilostane; buserelin; luteinizing hormone releasing hormone (LHRH); Histrelin; trilostane or modrastane; fosrelin; goserelin.

[1635] According to some embodiments G of the third embodiments according to the 22^{nd} aspect, the one or more further therapeutically active compounds comprise(s) an antibody targeting myeloid suppressive cells.

[1636] According to some embodiments H of the third embodiments according to the 22^{nd} aspect, the one or more further therapeutically active compounds comprise(s) agents that prime antigen presenting cells (APC), which in turn can activate T cells.

[1637] According to some embodiments I of the third embodiments according to the 22^{nd} aspect, the one or more further therapeutically active compounds comprise(s) a BiTE antibody. BiTE antibodies are bispecific antibodies that direct T-cells to attack cancer cells by simultaneously binding the two cells. The T-cell then attacks the target cell, i.e. the Treg. For example, a BiTE approach is complementary to the ADCC based approach of a naked CCR8 antibody.

### Standard Therapy

[1638] According to some embodiments J of the third embodiments according to the 22^{nd} aspect, the combination is a combination with the standard of care for the tumor or the disease characterized by chemokine receptor positive, e.g. CCR8 positive cells. The standard of care can be the standard of care for any of T-cell acute lymphoblastic leukemia, breast cancer, triple-negative breast cancer, triple positive breast cancer, non-small cell lung cancer (NSCLC), testicular cancer, gastric cancer, head and neck squamous cell carcinoma, thymoma, esophageal adenocarcinoma, colorectal cancer, pancreatic adenocarcinoma, ovarian cancer or cervical cancer, acute myeloid leukemia, kidney cancer, bladder cancer, melanoma, thyroid cancer, mesothelioma, sarcoma and prostate cancer.

[1639] According to some preferred embodiments, the standard of care is the standard of care for the treatment of head and neck cancer, breast cancer, gastric cancer, lung cancer, squamous cell carcinoma, esophageal tumor, melanoma, bladder cancer, liver cancer, and/or prostate cancer. In case of doubt, the standard of care is defined as in the “S3 Leitlinie” for the respective tumor, e.g. Leitlinie Analkarzinom, Aktinische Keratose and Plattenepithelkarzinom der Haut, Chronische Lymphatische Leukämie (CLL), Endometriumkarzinom, Follikuläres Lymphom, Harnblasenkarzinom, Hautkrebs-Prävention, Hepatozelluläres Karzinom (HCC), Hodentumoren, Hodgkin-Lymphom, Kolorektales Karzinom, Larynxkarzinom, Lungenkarzinom, Magenkarzinom, Mammakarzinom, Melanom, Mundhoehlenkarzinom, Nierenzellkarzinom, Ovarialkarzinom, Ösophaguskarzinom, Palliativmedizin, Pankreaskarzinom, Peniskarzinom, Prostatakarzinom, Psychoonkologie, Supportive Therapie, Zervixkarzinom, being effective on 2020-06-26, cf. www.leitlinienprogramm-onkologie.de/leitlinien/, incorporated herein by reference in its entirety as available 01-06-2021.

### Radiation Therapy

[1640] According to some embodiments K of the third embodiments according to the 22^{nd} aspect, which may be and are suggested to be combined with the embodiments of the first and/or second embodiments according to the 22^{nd} aspect, the use is a use in simultaneous, separate, or sequential combination with radiation therapy.

[1641] For example, the radiation therapy may be a therapy involving a radiation scheme as known in the art, e.g. comprising external beam therapy by x-ray with a typical total dose of 40 Gy fractionated into 15 daily treatments or a total dose of 70 Gy fractionated to 37 daily treatments. For example, the radiation therapy may be brachytherapy. Example 12.6.8 shows a combination treatment with an anti-CCR8 antibody and radiotherapy.

### NK Cell Therapy

[1642] According to some embodiments L of the third embodiments according to the 22^{nd} aspect, which may be and are suggested to be combined with the embodiments of the first and/or second embodiments according to the 22^{nd} aspect, the use is a use in simultaneous, separate, or sequential combination with NK cell therapy. The NK cell therapy can for example comprise the use of an engineered NK cell line as described in EP1771471 or can comprise the use of isolated primary NK cells, potentially including modifications such as a chimeric receptor, cf. WO2006052534.

### Targeting Cell Surface Molecules Associated with T-Cell Activation

[1643] According to some embodiments M of the third embodiments of the 22^{nd} aspect, there is provided the antibody or antigen binding fragment according to the 6^{th}, 7^{th}, 8^{th}, 9^{th}, 10^{th}, 11^{th}, 12^{th}, 13^{th}, 14^{th}, 15^{th}, 16^{th}, 17^{th} and/or 18^{th} aspect, or a conjugate according to the 19^{th} aspect or the pharmaceutical composition according to the 20^{th} aspect for use in simultaneous, separate, or sequential combination with one or more further therapeutically active compounds targeting cell surface molecules associated with T-cell activation, selected from CD25, CTLA-4, PD-1, LAG3, TIGIT, ICOS, and TNF receptor super family members, 4-1BB, OX-40, and GITR.

### B Cell Depletion

[1644] According to some embodiments N of the third embodiments according to the 22^{nd} aspect, which may be and are suggested to be combined with the embodiments of the first and/or second embodiments according to the 22^{nd} aspect, the use is a use in simultaneous, separate, or sequential combination with intra-tumoral B cell depletion. Intra-tumoral B cell depletion may occur by administration of an antibody or other molecule or any further treatment specifically targeting intra-tumoral B cells, preferably CD19+ B cells. Example 12.3.2 shows a treatment where an anti-CCR8 antibody was administered and intra-tumoral CD19+ B cells were depleted. While CD8+ T cell depletion abolished the beneficial effect of the treatment with an anti-CCR8 antibody, it was surprisingly found, that B cell depletion improved the beneficial effect of the treatment with an anti-CCR8 antibody. Without limitation, B cell depletion may occur by using an antibody targeting CD19 or CD20 or another suitable B cell marker.

### Stratification/Prediction and Monitoring Schemes

[1645] The stratification steps described according to the following embodiments are also provided as stand-alone methods, e.g. for stratification, diagnosis, or monitoring of treatment success for an anti-CCR8 antibody treatment.

[1646] According to some fourth embodiments according to the 22^{nd} aspect, which may be and are suggested to be combined with the embodiments of the first, second and/or third embodiments according to the 22^{nd} aspect, the use comprises determining certain parameters to predict or monitor treatment success, e.g. for stratifying a group of subjects or patients to predict tumor response or to monitor treatment success. For example, the subjects may be human or non-human, such as mouse, rodent, or cynomolgus.

[1647] According to some embodiments A of the fourth embodiments according to the 22^{nd} aspect, the use comprises determining
[1648] a. presence or quantity of tumor infiltrating lymphocytes,
[1649] b. presence or quantity of macrophages and/or NK cells,
[1650] c. presence or quantity of CCR8 positive or FOXP3 positive regulatory T cells,
[1651] d. tumor mutational burden,
[1652] e. cancer staging,
[1653] f. presence, level or activation of interferon-stimulated genes or proteins,
[1654] g. CCR8 expression,
[1655] h. presence or quantity of complement factor proteins, serpins, and/or MHC components,
[1656] i. presence or quantity of cytokines, such as inflammatory or suppressive cytokines,
[1657] j. activation of immune gene expression,
[1658] k. immune checkpoint protein expression, such as PD-(L)1 or CTLA4 expression,
[1659] l. presence or quantity of tumor infiltrating CD19+ B cells, and/or
[1660] m. presence or quantity of tumor infiltrating CD8+ T cells,
   for stratifying a group of subjects or patients to predict tumor response, or for predicting or monitoring treatment success.

[1661] According to some embodiments A1 of the fourth embodiments according to the 22^{nd} aspect, the use comprises determining the presence or quantity of (a) tumor infiltrating lymphocytes, (b) macrophages and/or NK cells, and/or (c) CCR8 positive or FOXP3 positive regulatory T cells. Evaluation of presence or quantity of cell types such as (a) tumor infiltrating lymphocytes, (b) macrophages and/or NK cells, and/or (c) CCR8 positive regulatory T cells may occur using biopsy, such as skin biopsy, surgical biopsy, endoscopic biopsy or needle biopsy, such as fine-needle aspiration, core needle biopsy, vacuum-assisted biopsy, or image-guided biopsy and subsequent staining. The number or relative amount of (a) tumor infiltrating lymphocytes, (b) macrophages and/or NK cells, and/or (c) CCR8 positive regulatory T cells may then be compared to a reference, e.g. a reference sample or a reference value. The relative presence or quantity of (a) tumor infiltrating lymphocytes, (b) macrophages and/or NK cells, and/or (c) CCR8 positive regulatory T cells may be used to predict a favorable response to treatment with an antibody or fragment according to the current invention. In the alternative, a scoring system may be used, e.g. to determine the number or relative amount of tumor infiltrating lymphocytes, such as the scoring system described in Zhang, Dachuan, et al. “Scoring system for tumor-infiltrating lymphocytes and its prognostic value for gastric cancer.” Frontiers in immunology 10 (2019): 71.

[1662] According to some embodiments A2 of the fourth embodiments according to the 22^{nd} aspect, the use comprises determining tumor mutational burden for predicting and monitoring tumor response. Tumor mutational burden (TMB) is a biomarker that measures the number of somatic mutations present in a cancer patient's tumor and is quantified as mutations per megabase (mut/Mb). This metric can be used in order to stratify patients, e.g. to predict or monitor response to treatment with an antibody or conjugate according to the current invention. FDA-approved tests exist and may be used e.g. with a reference value of ≥10 mut/Mb. In the alternative, microsatellite instability (MSI) may be used for stratification, which is caused by failure of the DNA mismatch repair system.

[1663] According to some embodiments A3 of the fourth embodiments according to the 22^{nd} aspect, the use comprises determining cancer staging for predicting and monitoring tumor response. Cancer staging may be performed as known in the art, e.g. using the TNM classification system or the FIGO staging, and may be used in order to stratify patients, e.g. to predict or monitor response to treatment with an antibody or conjugate according to the current invention.

[1664] According to some embodiments A4 of the fourth embodiments according to the 22^{nd} aspect, the use comprises determining presence, level or activation of interferon or interferon-stimulated genes or proteins for predicting and monitoring tumor response. An interferon-stimulated gene is a gene whose expression is stimulated by interferon, in particular by IFNg. Suitable interferon-stimulated genes or proteins include without limitation ACOD1, ACTG1, ACTR2, ACTR3, ADAMTS13, AIF1, AQP4, ASS1, B2M, BST2, C9JQL5, CALCOCO2, CAMK2A, CAMK2B, CAMK2D, CAMK2G, CASP1, CCL1, CCL11, CCL13, CCL14, CCL15, CCL15, CCL14, CCL16, CCL17, CCL18, CCL19, CCL2, CCL20, CCL21, CCL22, CCL23, CCL24, CCL25, CCL26, CCL3, CCL3L1, CCL4, CCL4L1, CCL5, CCL7, CCL8, CD40, CD44, CD58, CDC42EP2, CDC42EP4, CIITA, CITED1, CLDN1, CX3CL1, CXCL16, CYP27B1 DAPK1, DAPK3, EDN1, EPRS, EVL, FCGR1A, FCGR1B, FLNB, GAPDH, GBP1, GBP2, GBP4, GBP5, GBP6, GCH1, GSN, HCK, HLA-A, HLA-B, HLA-C, HLA-DPA1, HLA-DPB1, HLA-DQA1, HLA-DQA2, HLA-DQB1, HLA-DQB2, HLA-DRA HLA-DRB1, HLA-DRB3, HLA-DRB4, HLA-DRB5, HLA-E, HLA-F, HLA-G, HLA-H, ICAM1, IFI30, IFITM1, IFITM2, IFITM3, IFNG, IFNGR1, IFNGR2, IL12B, IL12RB1 IL23R, IRF1, IRF2, IRF3, IRF4, IRF5, IRF6, IRF7, IRF8, IRF9, JAK1, JAK2, KIF16B, KIF5B, KYNU, LGALS9, MEFV, MID1, MRC1, MT2A, MYO1C, NCAM1, NMI, NOS2, NUB1, OAS1, OAS2, OAS3, OASL, PDE12, PML, PRKCD, PTAFR, RAB12, RAB20, RAB43, RAB7B, RPL13A, RPS6KB1 RYDEN, SEC61A1 SLC11A1 SLC26A6 SLC30A8 SNCA, SP100, STAR, STAT1, STX4, STX8, STXBP1, STXBP2, STXBP3, STXBP4, SYNCRIP TDGF1, TLR2, TLR3, TLR4, TRIM21, TRIM22, TRIM25, TRIM26, TRIM31, TRIM34, TRIM38, TRIMS, TRIM62, TRIM68, TRIMS, UBD, VAMP3, VCAM1, VIM, VPS26B, WAS, WNT5A, XCL1, XCL2, ZYX.

[1665] According to some embodiments A5 of the fourth embodiments according to the 22^{nd} aspect, the use comprises determining CCR8 expression for predicting and monitoring tumor response. CCR8 expression levels may be determined, e.g. based on biopsy samples, as known in the art, e.g. using IHC, PCR or ELISA based methods, for example using an antibody, fragment or conjugate as disclosed herein.

[1666] According to some embodiments A6 of the fourth embodiments according to the 22^{nd} aspect, the use comprises determining presence, level or activation of genes or proteins selected from (a) complement factor proteins, (b) serpins, (c) MHC components or (d) Arg2 or (e) another biomarker disclosed herein (see e.g. example 12.7.1 or 12.7.2) for predicting and monitoring tumor response. Suitable complement factor proteins include without limitation C1R, C1S, C4A, C5ar2, F12, and MASP2, or their analogues from the respective species for treatment. Suitable serpins include without limitation Serpina1a, Serpina1b, Serpina1d, Serpina3i, or their analogues from other species. Suitable MHC components include without limitation H2-K2, H2-T24, H2-Q10, H2-B1, H2-Q1, H2-Q5, and H2-DMb2, or their analogues from other species.

[1667] As discussed in example 12.1.2, the inventors found based on genome wide RNA-seq data of early tumors from syngeneic mouse models, that increased levels of the following genes strongly correlated with tumor response: Eif3j2, Eno1b, Ifi44l, Hist1 h2al, Ifi202b, Hmga1b, Amd2, Sycp1, ItIn1, Trim34b, Catsperg2, Zfp868, Serpina1b, Prss41, C1rb, Cy1d, Ccnb1ip1, Masp2, Acaa1b, C4a, Snord93, Abhd1, Serpina3 h, H2-K2, Cd1d2, Hal, Rnf151, Rbm46, Arg2, Mir8099-2, Igsf21, Olfr373, C1s2, Crym, Aryl, Hddc3, Plppr4, Ppp1r11, Rps3a2, Zfp459, Rnd1, Serpina1a, Vcpkmt, Atp10d, Gbp2b, H2-T24, Tlcd2, Ctse, H2-Q10, Cyp2c55, Borcs8, Tpsab1, Trim43b, Cc2d1a, Serpina1d, Cacna1a, Kcnj14, Ttc13, Farsa, Olfr1217, Jaml, H2-B1, Tnpo2, Rims3, Dock9, Car5b, Atp1a4, H2-Q1, Zfp69, Slpi, Pcdhgb8, Ocel1, Selenbp2, Nsd3, Wt1, Nap112, Ranbp9, Gtpbp3, AY761185, Rnaset2a, Serpina3i, E112, Gal3st2b, Urb2, F12, Klk1, Ifi214, Cstl1, Agtpbp1, Msh5, Cox18, Zfp330, Ttc37, Klk4, H2-Q5, Cxcl11, Rab39, Pm20d1, Nod2, H2-DMb2. Interestingly, this set is highly enriched for early complement factors, complement regulating factors such as Serpins, and MHC components. In particular, the presence of high levels of Complement C1/C4 might contribute to Treg lysis. Where depletion/consumption of complement factors reduces the efficacy of Treg depletion, supplementing the complement system, e.g. in a combination treatment may be an option.

[1668] According to some preferred embodiments of the fourth embodiments according to the 22^{nd} aspect, the use comprises determining the presence, level or activation of genes or proteins selected from Eif3j2, Eno1b, Ifi441, Hist1 h2al, Ifi202b, Hmga1b, Amd2, Sycp1, Itln1, Trim34b, Catsperg2, Zfp868, Serpina1b, Prss41, C1rb, Cyld, Ccnb1ip1, Masp2, Acaa1b, C4a, Snord93, Abhd1, Serpina3 h, H2-K2, Cd1d2, Hal, Rnf151, Rbm46, Arg2, Mir8099-2, Igsf21, Olfr373, C1s2, Crym, Awl, Hddc3, Plppr4, Ppp1r11, Rps3a2, Zfp459, Rnd1, Serpina1a, Vcpkmt, Atp10d, Gbp2b, H2-T24, Tlcd2, Ctse, H2-Q10, Cyp2c55, Borcs8, Tpsab1, Trim43b, Cc2d1a, Serpina1d, Cacna1a, Kcnj14, Ttc13, Farsa, Olfr1217, Jaml, H2-B1, Tnpo2, Rims3, Dock9, Car5b, Atp1a4, H2-Q1, Zfp69, Slpi, Pcdhgb8, Ocel1, Selenbp2, Nsd3, Wt1, Nap112, Ranbp9, Gtpbp3, AY761185, Rnaset2a, Serpina3i, E112, Gal3st2b, Urb2, F12, Klk1, Ifi214, Cstl1, Agtpbp1, Msh5, Cox18, Zfp330, Ttc37, Klk4, H2-Q5, Cxcl11, Rab39, Pm20d1, Nod2, H2-DMb2 or any combination thereof for predicting and monitoring tumor response. As immediately understood by the skilled person, for a human subject, the stratification, prediction or monitoring method comprises determining the presence, level or activation of the human counterparts of the provided genes or proteins. According to some embodiments A7 of the fourth embodiments according to the 22^{nd} aspect, the use comprises determining presence or quantity of inflammatory or suppressive cytokines for predicting and monitoring tumor response. Evaluation of presence or quantity of inflammatory or suppressive cytokines may occur as known in the art.

[1669] According to some embodiments A8 of the fourth embodiments according to the 22^{nd} aspect, the use comprises predicting or monitoring tumor response based on the activation of immune gene expression. Measuring the activation of immune gene expression may occur using a method known in the art, e.g. using gene set enrichment analysis or using a marker-based assay known in the art. Furthermore, stratifying, predicting or monitoring may occur based on a gene signature characteristic for activated Tregs or immune cells.

[1670] According to some highly preferred embodiments A9 of the fourth embodiments according to the 22^{nd} aspect, the use comprises stratifying a group of subjects or patients to predict tumor response based on immune checkpoint protein expression, such as PD-L1 expression, PD-1 expression or CTLA4 expression, or the use comprises determining immune checkpoint protein expression levels, such as PD-L1 expression, PD-1 expression or CTLA4 expression for predicting and monitoring tumor response. Programmed death-ligand 1 (PD-L1) is an immune-related biomarker that can be expressed on the surface of many tissue types, including tumor cells. PD-L1 protein expression can be determined by using Tumor Proportion Score (TPS) or Combined Positive Score (CPS). According to the current invention it was surprisingly found that the response to (mono) therapy with anti-CCR8 antibody was improved for subjects having an ICI-responsive tumor and in particular a tumor with (high) PD-L1 expression (cf. example 12.7). Following up on this observation, the inventors found that infiltration with FoxP3+ Treg cells was likewise associated with high PD-L1 expression. The inventors therefore suggest PD-L1 as a surrogate marker for stratification to overcome the problem that CCR8 is difficult to analyze and therefore cannot be easily used to select subject populations that could most likely benefit from anti-CCR8 antibody treatment. In particularly preferred embodiments, PD-L1 expression is determined based on CPS or TPS. A subject or patient is determined as eligible for treatment with an anti-CCR8 antibody, if PD-L1 expression is present or high, e.g. as indicated by a CPS≥1, preferably by a CPS≥5, most preferably by a CPS≥10, or as indicated by a TPS≥1%, preferably by a TPS≥10%, most preferably by a TPS≥50%.

### Aspect 23—Further and Diagnostic Uses

[1671] The anti-chemokine receptor or anti-CCR8 antibodies, fragments and conjugates as described herein may be used for a variety of purposes, such as to assist purification or immobilization of chemokine receptor or CCR8 expressing cells, such as activated or intra-tumoral Tregs, for in vitro, in vivo and ex vivo applications or diagnostics. As a specific example, the antibodies can be used in immunoassays for qualitatively and/or quantitatively measuring levels of chemokine receptors or chemokine receptor expressing cells in biological samples, see, e.g., Harlow et al., Antibodies: A Laboratory Manual, Second Edition (Cold Spring Harbor Laboratory Press, 1988).

[1672] For example, anti-chemokine receptor antibodies, anti-CCR8 antibodies or antigen-binding fragments thereof can be used for detecting the presence of chemokine receptor- or CCR8-expressing tumors. The presence or level of chemokine receptor- or CCR8-expressing cells or shed chemokine receptor or CCR8 within various biological samples, including serum, and tissue biopsy specimens, may be analyzed. In addition, anti-chemokine receptor or anti-CCR8 antibodies may be used in various imaging methodologies such as immunoscintigraphy with a 99Tc (or a different isotope) conjugated antibody. For example, an imaging protocol similar to the one described using a 111In conjugated anti-PSMA antibody may be used to detect cancer (Sodee, D. Bruce, et al. “Preliminary Imaging Results Using In-111 Labeled CYT-356 (Prostascintst) in the Detection of Recurrent Prostate Cancer.” Clinical nuclear medicine 21.10 (1996): 759-767). Another method of detection that can be used is positron emitting tomography, e.g. by conjugating the antibodies of the invention with a suitable isotope (see Herzog, Hans, et al. “Measurement of pharmacokinetics of yttrium-86 radiopharmaceuticals with PET and radiation dose calculation of analogous yttrium-90 radiotherapeutics.” Journal of Nuclear Medicine 34.12 (1993): 2222-2226).

[1673] According to a 23^{th} aspect, there is provided the antibody or antigen binding fragment according to the 6^{th}, 7^{th}, 8^{th}, 9^{th}, 10^{th}, 11^{th}, 12^{th}, 13^{th}, 14^{th}, 15^{th}, 16^{th}, 17^{th} and/or 18^{th} aspect, or a conjugate according to the 19^{th} aspect or the pharmaceutical composition according to the 20^{th} aspect for use in diagnostic applications or diagnosis.

[1674] In some first embodiments of the 23^{th} aspect, there is provided an antibody or antigen binding fragment according to the 6^{th}, 7^{th}, 8^{th}, 9^{th}, 10^{th}, 11^{th}, 12^{th}, 13^{th}, 14^{th}, 15^{th}, 16^{th}, 17^{th} and/or 18^{th} aspect, or a conjugate according to the 19^{th} aspect or the pharmaceutical composition according to the 20^{th} aspect for use in a method of diagnosis in vivo. The use may be a use for the diagnosis of a tumor or a disease characterized by chemokine receptor positive cells, e.g. CCR8 positive cells, such as CCR8 positive regulatory T cells. For example, the tumor or the disease characterized by chemokine receptor positive cells, is selected from T-cell acute lymphoblastic leukemia, breast cancer, triple-negative breast cancer, triple positive breast cancer, non-small cell lung cancer (NSCLC), small cell lung cancer (SCLC) testicular cancer, gastric cancer, head and neck squamous cell carcinoma, thymoma, esophageal adenocarcinoma, colorectal cancer, pancreatic adenocarcinoma, ovarian cancer or cervical cancer, acute myeloid leukemia, kidney cancer, bladder cancer, skin cancer, melanoma, thyroid cancer, mesothelioma, sarcoma and prostate cancer. According to some preferred embodiments, the use in a method of diagnosis in vivo is the use in the diagnosis of head and neck cancer, breast cancer, gastric cancer, lung cancer, squamous cell carcinoma, esophageal tumor, melanoma, bladder cancer, liver cancer, and/or prostate cancer, or any other tumor described herein.

[1675] According to some preferred embodiments, the antibody or antigen binding fragment according to the 6^{th}, 7^{th}, 8^{th}, 9^{th}, 10^{th}, 11^{th}, 12^{th}, 13^{th}, 14^{th}, 15^{th}, 16^{th}, 17^{th} and/or 18^{th} aspect, or a conjugate according to the 19^{th} aspect or the pharmaceutical composition according to the 20^{th} aspect is used for the stratification of subjects or patients for treatment, e.g. for the treatment of a disease described herein.

### Aspect 24—DNA/RNA for CCR8 Antibody

[1676] According to a 24^{th} aspect, there is provided a polynucleotide encoding an antibody or antigen-binding fragment according to the 6^{th}, 7^{th}, 8^{th}, 9^{th}, 10^{th}, 11^{th}, 12^{th}, 13^{th}, 14^{th}, 15^{th}, 16^{th}, 17^{th} and/or 18^{th} aspect. Preferably the polynucleotide according to this aspect is a polynucleotide as provided according to the sequence listing.

### Aspect 25—Vector for Antibody

[1677] According to a 25^{th} aspect, there is provided a vector comprising a polynucleotide according to the 24^{th} aspect. Various suitable vector systems are known in the art or described herein.

### Aspect 26—Production Cell for Antibody

[1678] According to a 26^{th} aspect, there is provided an isolated cell arranged for production of an antibody or antigen-binding fragment according to the 6^{th}, 7^{th}, 8^{th}, 9^{th}, 10^{th}, 11^{th}, 12^{th}, 13^{th}, 14^{th}, 15^{th}, 16th, 17^{th} and/or 18^{th} aspect. Preferably the isolated cell according to the current aspect is an eukaryotic cell, such as a CHO or HEK cell comprising a vector according to the 25^{th} aspect. In another preferred embodiment, the cell is a rat myeloma YB2/0 cell.

### Aspect 27—Production Method for Antibody

[1679] According to a 27^{th} aspect, there is provided a method of producing an antibody or antigen-binding fragment according to the 6^{th}, 7^{th}, 8^{th}, 9^{th}, 10^{th}, 11^{th}, 12^{th}, 13^{th}, 14^{th}, 15^{th}, 16^{th}, 17^{th} and/or 18^{th} aspect, or a conjugate according to the 19^{th} aspect, comprising culturing a cell according to the 26^{th} aspect and optionally purification of the antibody or antigen-binding fragment. In some highly preferred embodiments, the method comprises afucosylation of the antibody as described elsewhere herein. In some embodiments, the method comprises purification of the antibody.

[1680] For example, the antibody according to the present invention may be purified by the purification process described in the following. The purification process described is suitable for a wide range of monoclonal IgG antibodies and is optimized for bioreactor titers up to 8 g/L with an expected harvest volume of e.g. 2000 L from a single-use or stainless-steel bioreactor. With appropriate modifications, antibody cultures with other titer ranges can be processed. Cell cultures are harvested and clarified via depth filtration and/or charged filtration. Clarified harvest is stored in single-use bags or in a stainless-steel storage tank with optional cooling.

### General Process Conditions

[1681] Closed processing and single-use systems are preferred; stainless-steel skids or systems are also possible with appropriate cleaning and change-over procedures. Single-use bags are typically of low-density or ultra-low density polyethylene as contact layer. Among others, Sodium Acetate/Acetic Acid or Tris/Tris-HCl buffer systems may be used, usually in a total concentration of 50 mM and including 50 mM NaCl, unless otherwise noted. Buffers and process intermediates of the respective unit operations (e.g. Load, Eluate or Flowthrough) are usually 0.2 μm filtered inline or with a filtration assembly, using e.g. PES membrane and/or fleece filters. These solutions are usually stored in single-use bags or stainless-steel vessels, at ambient (e.g. 18-26° C.) or 2-8° C. conditions.

### Capture

[1682] Antibody capture is performed using Protein A-based chromatography, utilizing e.g. Cytiva MabSelect SuRe, MabSelect SuRe LX, Mab Select PrismA or Purolite A50 resins. Loading is conducted following clarification, with or without pre-concentration by ultrafiltration. The loading density is typically 45-75 g/L, using a single or a variable flow rate to apply the clarified harvest onto the column (120-400 cm/h). The chromatography can be performed in batch mode with one or more columns, or in continuous (MCC (multi-column chromatography)/SMB (simulated moving bed)) mode with up to 8 columns. Pre- or self-packed columns are used with a typical bed height of 20 cm for batch mode. For continuous mode, a contact time of the clarified harvest to the resin of 1-4 min is targeted. The capture is performed in one or multiple cycles depending on the antibody titer. Prior to loading, the column is equilibrated using a Tris buffer (e.g. pH 7); washing is performed with at least two washing steps; high NaCl concentration in the first wash buffer, then low NaCl concentration in the second buffer (e.g. 1st wash: 1 M NaCl, pH 5.5; 2nd wash: 50 mM NaCl, pH 6.0) in acetate buffer. Elution may for instance be achieved by low pH (e.g. 3.5) acetate buffer containing 0-50 mM NaCl in typically ≤5 column volumes (CV) with UV- or volume-controlled eluate collection. The eluates may be pooled and well mixed at this step or after virus inactivation. The affinity column is regenerated by ≥3 CV acetic acid (e.g. 0.1 M, incl. 500 mM NaCl), sanitization (clean-in-place, CIP) occurs with, 0.5-1.0 M NaOH for 30 min, re-equilibration with ≥4 CV. The column is stored in e.g. 20% EtOH or 2% BnOH.

[1683] Alternatively, affinity capture from clarified harvest can be performed with affinity ligands on a cellulose architecture (e.g. Fibro PrismA) using the same loading schemes and buffer system as outlined above. Regeneration or CIP block may be skipped for optimal processing time. A contact time of 5-20 seconds can be applied to Fibro units of varying sizes (e.g. 0.4 mL to 2.4 L). Typically, a loading capacity of 25-35 g/L unit volume can be realized. A single unit can be used to process a single batch or multiple batches, depending on the Fibro unit and bioreactor sizes as well as titer of antibody culture. Affinity loading materials can be further clarified by charged filters at >300 L/m2 throughput prior to loading to maximize lifetime use and to minimize fouling.

### Low-pH Virus Inactivation

[1684] The capture eluate is adjusted with HOAc or HCl to pH 3.7-3.9 and held for 120-240 min in the same or a separate bag at≥18° C. to inactivate potentially present viruses. Alternatively, viral inactivation is carried out at pH 3.4-3.6 for >30 minutes. The process intermediate is then adjusted to storage or to further processing conditions, e.g. to pH 4-7 using 1-2 M Tris/-HCl titrant stock.

### Polishing 1

[1685] The antibody is further polished by anion exchange chromatography (AEX), typically in the form of membrane capsule or cassettes (e.g. Sartorius Sartobind STIC PA 4 mm or 3M MA ST Polisher) in flow-through mode, with flow rates ≤350 MV/h, for removal of process-related and/or product-related impurities and particles. The entire amount from one batch may be processed in one or in multiple cycles, depending on the antibody amount. Prior to loading, the intermediate is adjusted to a target conductivity of e.g. 8-20 mS/cm, and a target pH of e.g. 7.0 for antibodies with basic isoelectric points. For antibodies with an isoelectric point lower than pH 7.0, the conductivity could be 5-20 mS/cm, and the pH can be between its isoelectric point and pH 5.0 The membrane is equilibrated with Tris buffer, pH 7.0 or Acetate buffer pH 5-6, and loaded with densities between typically 0.5-10 g antibody/mL membrane volume (MV). A chase with equilibration buffer may be performed and combined with the collected flow-through, the collection criteria of which is controlled by e.g. UV or volume. The membrane adsorber may be used once or multiple times, for which it is regenerated (1 M NaCl for 25 MV) and, re-equilibrated (Tris buffer pH 7.0).

### Polishing 2

[1686] Final polishing may for instance be achieved by cation exchange chromatography (CEX). In principle, the order of AEX and CEX unit operations may be reversed. The CEX unit operation is usually performed in bind & elute mode with flow rates between 100-200 cm/h. Pre- or self-packed columns with resins e.g. Cytiva Capto S ImpAct or Capto SP ImpRes may be used at 20 cm bed height. The polishing step is performed in one or multiple cycles depending on the antibody amount. If needed, the load may be adjusted to target conductivities between 5-9 mS/cm and to pH 4.5-7.5 with HOAc, Tris titrants or WFI. The load is applied at typical densities between 40-105 g/L onto a CEX column equilibrated with ≥5 CV acetate buffer (pH and conductivity matched to CEX load) and washed afterwards using ≥5 CV of the same buffer. The antibody is eluted using an acetate buffer with suitable NaCl concentration (>50 mM; <500 mM), and the eluate is collected by UV-control in typically ≤10 CV collected eluate volume. The column is regenerated using 0.5-2 M NaCl in acetate buffer, re-equilibrated (≥5 CV with CEX equilibration buffer), sanitized (0.5-1.0 M NaOH for ≥30 min), re-equilibrated (≥5 CV with CEX equilibration buffer), and finally stored in e.g. 20% EtOH or 2% BnOH.

### Additional Polishing

[1687] When additional polishing is needed to remove residual product- or process-related impurities, a mixed mode chromatography (MMC) may be used in place of, or together with, the CEX step. Example of mixed mode chromatographic resins are Capto adhere and Capto MMC ImpRes. This unit operation is typically operated in a flow-through mode but bind-and-elute mode may also be employed. The column can be self- or pre-packed with a bed height of 5-20 cm at various diameters and operated at flow rates between 100-500 cm/h in a flowthrough mode or 100-220 cm/hr in a bind-and-elute mode.

[1688] The load is typically adjusted, if needed, to target conductivities between 3-12 mS/cm and to pH 4.2-7.5 with HOAc, Tris titrants or WFI. The load is applied at typical densities between 75-300 g/L onto a MMC column equilibrated with ≥5 CV acetate buffer (pH and conductivity matched to MMC load). A chase with equilibration buffer may be performed and combined with the collected flow-through, the collection criteria of which is controlled by e.g. UV or volume. The MMC column might be used once or multiple times depending on the amount of antibody to be polished. The column is regenerated using 0.5-2 M NaCl in acetate buffer, re-equilibrated (≥5 CV with equilibration buffer), sanitized (0.5-1.0 M NaOH for ≥30 min), and finally stored in e.g. 20% EtOH or 2% BnOH.

### Nanofiltration

[1689] Potentially remaining adventitious viruses are removed by PDVF-based nanofiltration, e.g. using Planova BioEX with or without prefilter. The load is applied at constant pressure (e.g. 2.0-3.4 bar) with a loading density of 1500-5000 g antibody/m² to a pre-equilibrated nanofilter (≥5 L/m² acetate buffer, recipe e.g. matched to MA AEX or CEX elution conditions). The filter may be chased using the same buffer and the integrity of the filter is typically tested post-use. Upon failure of the integrity test, this step may be repeated. Alternatively, adventitious viruses can be removed by cellulose-base nanofiltration with or without a prefilter. The load is applied at a constant pressure (e.g. 0.8-1.2 bar) with a loading density of 500-2000 g antibody/m² to a pre-equilibrated nanofilter (≥5 L/m² acetate buffer, recipe e.g. matched to MA AEX or CEX elution conditions).

### Concentration and Buffer Exchange

[1690] The intermediate is concentrated by ultrafiltration to 15-110 g/L, diafiltered with ≥6 diafilter volumes against a diafiltration buffer (DFB) (e.g. 10 mM histidine, 10 mM methionine, 30 mM arginine, pH 5.3), and, if needed, further concentrated up to 200 g/L. This is typically performed using a tangential-flow filtration device and a suitable membrane with a cutoff of 30-50 kDa (e.g. Millipore Pellicon, Sartorius Hydrosart, Pall Omega) with a load of typically 300-1000 g antibody/m². The process is typically controlled by feed or retentate flow (e.g. 2-7 L/min/m²), alternatively by feed pressure (2-4 bar), and by TMP (0.7-2 bar). The membrane may be chased by DFB and the pooled retentate diluted with DFB to the target concentration. The TFF system and membranes are sanitized with, 0.5 M NaOH and equilibrated with acetate buffer or DFB. The membrane integrity or permeability is tested pre-use.

### Stabilization

[1691] In an optional stabilization step, an excipient concentrate is added to produce bulk drug substance (BDS). A bioburden reduction filtration (e.g. 0.2 μm) is performed using an e.g. pre-equilibrated filter (e.g. excipient concentrate diluted in DFB), which is tested post-use for integrity. Upon failure of the integrity test, the filtration step may be repeated.

### Fill & Freeze

[1692] The BDS is filled in suitable bags with an LDPE contact layer (e.g. 5 or 10 L) with individual i.d. sampling compartments that are preferably aseptically connected and disconnected. The bags are individually protective packaged by optional vacu-sealing (LDPE overwrap bags) and placed in protective shells (e.g. RoSS Shells). After an optional intermediate 2-8° C. storage, the shelled bags are frozen (using a plate- or a passive freezer) and subsequently stored at ≤−30 or ≤−60° C., e.g. +/−5° C., alternatively at ≤−25 or ≤−60° C., e.g. +/−5° C.

### Aspect 28—Kit of Parts with Antibody Defined by Antigen

[1693] According to a 28^{th} aspect, there is provided a kit comprising the antibody or antigen-binding fragment according to the 6^{th}, 7^{th}, 8^{th}, 9^{th}, 10^{th}, 11^{th}, 12^{th}, 13^{th}, 14^{th}, 15^{th}, 16^{th}, 17^{th} and/or 18^{th} aspect, or a conjugate according to the 19^{th} aspect, or the pharmaceutical composition according to the 20^{th} aspect, with instructions for use.

[1694] The antibodies, fragments, conjugates or pharmaceutical compositions of the present invention can be provided in a kit, i.e., a packaged combination of reagents in predetermined amounts in one or more containers with instructions. For example, where the antibody, fragment or conjugate is a therapeutic antibody, fragment or conjugate, the instructions for use may comprise the package insert. For example, the package insert may comprise information describing an advantageous administration mode or combination treatment as described herein.

[1695] For example, where the antibody is labeled with an enzyme, the kit may include substrates and cofactors required by the enzyme (e.g., a substrate precursor which provides the detectable chromophore or fluorophore). In addition, other additives may be included such as stabilizers, buffers (e.g., a block buffer or lysis buffer) and the like. The relative amounts of the various reagents may be varied widely to provide for concentrations in solution of the reagents which substantially optimize the sensitivity of the assay. Particularly, the reagents may be provided as dry powders, usually lyophilized, including excipients which on dissolution will provide a reagent solution having the appropriate concentration.

### Aspect 29—Combination Treatment Comprising Anti-CCR8 Antibody

[1696] According to one aspect there is provided an anti-CCR8 antibody and a further therapeutically active compound or therapy for use in the treatment of a tumor, wherein the further therapeutically active compound is
[1697] a) a chemotherapeutic agent, preferably a taxane, doxorubicin, cis-platin, carboplatin, oxaliplatin, or gemcitabine,
[1698] b) an antibody targeting a further chemokine receptor, such as CCR1, CCR2, CCR3, CCR4, CCR5, CCR6, CCR7, CCR8, CCR9, CCR10, CXCR1, CXCR2, CXCR3, CXCR4, CXCR5, CXCR6, CX3CR1 or CXCR1,
[1699] c) an antibody targeting a protein which is specifically expressed by the tumor cells,
[1700] d) an antibody or a small molecule targeting HER2 and/or EGFR,
[1701] e) the standard of care for any of head and neck cancer, breast cancer, gastric cancer, lung cancer, squamous cell carcinoma, esophageal tumor, melanoma, bladder cancer, liver cancer, and/or prostate cancer,
[1702] f) a targeted kinase inhibitor, such as Sorafinib, Regorafenib, or MEKi-1, and/or
[1703] g) radiation therapy.

[1704] In other words, there is provided an anti-CCR8 antibody, preferably an anti-CCR8 antibody inducing ADCC and/or ADCP as described elsewhere herein, for use in the treatment of a tumor, wherein the use comprises administration of a further therapeutically active compound or therapy which does not target a checkpoint protein and is selected from
[1705] h) a chemotherapeutic agent, preferably a taxane, paclitaxel, doxorubicin, cis-platin, carboplatin, oxaliplatin, or gemcitabine,
[1706] i) an antibody targeting a further chemokine receptor, such as CCR1, CCR2, CCR3, CCR4, CCR5, CCR6, CCR7, CCR9, CCR10, CXCR1, CXCR2, CXCR3, CXCR4, CXCR5, CXCR6, CX3CR1 or CXCR1,
[1707] j) an antibody targeting a protein which is specifically expressed by the tumor cells,
[1708] k) an antibody or a small molecule targeting HER2 and/or EGFR,
[1709] l) the standard of care for any of head and neck cancer, breast cancer, gastric cancer, lung cancer, squamous cell carcinoma, esophageal tumor, melanoma, bladder cancer, liver cancer, and/or prostate cancer,
[1710] m) a targeted kinase inhibitor, such as Sorafinib, Regorafenib, or MEKi-1,
[1711] n) radiation therapy, and/or
[1712] o) (a compound or antibody for) depletion of intra-tumoral B cells, preferably CD19+ B cells.

[1713] The anti-CCR8 antibody may be an inventive anti-CCR8 antibody as described herein or any further therapeutically suitable anti-CCR8 antibody known in the art. The tumor may be any tumor described herein, e.g. for the 22^{nd} aspect. Preferably, the tumor or disease is characterized by chemokine receptor positive cells, such as CCR8 positive cells, such as CCR8 positive regulatory T cells or CCR8 positive tumor cells. Preferably the tumor is an ICI responsive tumor. Based on the examples described herein (e.g. examples 12.6 ff., see responding mouse models), it is plausible, that in particular those tumors which are or were initially responsive to immune checkpoint inhibition will profit from anti-CCR8 antibody treatment both, alone and in combination. The further therapeutically active compound may be a therapeutically active compound as described elsewhere herein. Suitable taxanes may be selected e.g. from paclitaxel, abraxane, cabazitaxel, or docetaxel, or derivatives thereof. According to a preferred embodiment, the use comprises furthermore administration of a checkpoint inhibitor such as an anti-PD-1 antibody, an anti-PD-L1 antibody or a CTLA4 antibody, e.g. as described elsewhere herein.

### ASPECT 30—Triple Combination Treatment Comprising Anti-CCR8 Antibody

[1714] According to one aspect there is provided an anti-CCR8 antibody, a checkpoint inhibitor such as an anti-PD-1 antibody, an anti-PD-L1 antibody or a CTLA4 antibody, and a further therapeutically active compound or therapy for use in the treatment of a tumor, wherein the further therapeutically active compound or therapy is preferably
[1715] a) an antibody targeting a further chemokine receptor, such as CCR1, CCR2, CCR3, CCR4, CCR5, CCR6, CCR7, CCR8, CCR9, CCR10, CXCR1, CXCR2, CXCR3, CXCR4, CXCR5, CXCR6, CX3CR1 or CXCR1,
[1716] b) an antibody targeting a protein which is specifically expressed by the tumor cells,
[1717] c) an antibody or a small molecule targeting HER2 and/or EGFR,
[1718] d) the standard of care for any of head and neck cancer, breast cancer, gastric cancer, lung cancer, squamous cell carcinoma, esophageal tumor, melanoma, bladder cancer, liver cancer, and/or prostate cancer,
[1719] e) a chemotherapeutic agent, preferably a taxane, paclitaxel, doxorubicin, cis-platin, carboplatin, oxaliplatin, or gemcitabine,
[1720] f) a targeted kinase inhibitor, such as Sorafinib, Regorafenib, or MEKi-1, and/or
[1721] g) radiation therapy,
[1722] h) (a compound or antibody for) depletion of intra-tumoral B cells, preferably CD19+ B cells.

[1723] In other words, there is provided an anti-CCR8 antibody inducing ADCC and/or ADCP for use in the treatment of a tumor, wherein the use comprises administration of a further therapeutically active compound or therapy which does not target a checkpoint protein and is selected from
[1724] a) a chemotherapeutic agent, preferably a taxane, paclitaxel, doxorubicin, cis-platin, carboplatin, oxaliplatin, or gemcitabine,
[1725] b) an antibody targeting a further chemokine receptor, such as CCR1, CCR2, CCR3, CCR4, CCR5, CCR6, CCR7, CCR9, CCR10, CXCR1, CXCR2, CXCR3, CXCR4, CXCR5, CXCR6, CX3CR1 or CXCR1,
[1726] c) an antibody targeting a protein which is specifically expressed by the tumor cells,
[1727] d) an antibody or a small molecule targeting HER2 and/or EGFR,
[1728] e) a targeted kinase inhibitor, such as Sorafinib, Regorafenib, or MEKi-1,
[1729] f) radiation therapy, and/or depletion of intra-tumoral B cells, preferably CD19+ B cells, and the use comprises furthermore administration of a checkpoint inhibitor such as an anti-PD-1 antibody, an anti-PD-L1 antibody or a CTLA4 antibody, e.g. as described elsewhere herein.

### ASPECT 31—Sequential Combination Treatment Comprising Anti-CCR8 Antibody

[1730] According to one aspect there is provided an anti-CCR8 antibody and a further therapeutically active compound or therapy for use in the treatment of a tumor, wherein a dose of the further therapeutically active compound or therapy is administered after the first dose of the anti-CCR8 antibody, e.g.
[1731] a) after the anti-CCR8 antibody has effected an increase of the intratumoral CD8 cell to T reg cell ratio at least by a factor of 2, 3, 4 or 5 or
[1732] b) after the anti-CCR8 antibody has depleted at least 40, 45, 50, 55, 60, 65 or 70% of the intratumoral Treg cells.

[1733] In other words, there is provided an anti-CCR8 antibody, preferably an anti-CCR8 antibody inducing ADCC and/or ADCP as described elsewhere herein, for use in the treatment of a tumor, wherein the use comprises administration of a further therapeutically active compound or therapy, wherein a dose of the further therapeutically active compound or therapy is administered after the first dose of the anti-CCR8 antibody, preferably
[1734] a) after the anti-CCR8 antibody has induced an increase of the intra-tumoral CD8 cell to T reg cell ratio at least by a factor of 2, 3, 4 or 5 or
[1735] b) after the anti-CCR8 antibody has depleted at least 40, 45, 50, 55, 60, 65 or 70% of the intra-tumoral Treg cells.

[1736] According to a preferred treatment scheme, treatment starts with administration of the first dose of anti-CCR8 antibody (e.g. daily, weekly, q2w, q3w or q4w as described above), followed by administration of the further therapeutically active compound or therapy. Without being bound by theory, the time between the initial dose of anti-CCR8 antibody and the further therapeutically active compound should be chosen to allow for an intra-tumoral Treg depletion of at least 40, 50, or 60%. The anti-CCR8 antibody may be an inventive anti-CCR8 antibody as described herein but may also be any further therapeutically suitable anti-CCR8 antibody. The tumor may be any tumor described herein, e.g. for the 22^{nd} aspect. Preferably, the tumor or disease is characterized by chemokine receptor positive cells, such as CCR8 positive cells, such as CCR8 positive regulatory T cells or CCR8 positive tumor cells. Preferably the tumor is or was initially an ICI responsive tumor. Since acquired resistance to PD(L)-1 antibodies might strongly be influenced by intra-tumoral activated regulatory T cells (characterized by CCR8 expression) sequential treatment with an anti-CCR8-antibody combined with a checkpoint inhibitor is beneficial to overcome such an acquired resistance. Administering the further therapeutically active compound or therapy after the first dose of the anti-CCR8 antibody was found to substantially improve the efficacy of the treatment, even for extremely challenging tumor models. The time between the first dose of the anti-CCR8 antibody and the dose of the further therapeutically active compound shall be sufficient to induce a first anti-tumor immune response. According to the data provided herein (cf. examples 12.6 ff), this is indicated by an increase of the intra-tumoral CD8 cell to T reg cell ratio at least by a factor of 2, 3, 4 or 5 or by (temporary) depletion of at least 40, 45, 50, 55, 60, 65 or 70% of the intra-tumoral Treg cells.

[1737] The further therapeutically active compound or therapy may be any compound or therapy disclosed elsewhere herein. The therapeutically active compound may or may not be a checkpoint inhibitor, e.g. an anti-PD-L1 antibody, an anti-PD1 antibody or an anti-CTLA4-antibody. Although the second therapeutic agent may be a non-targeted therapeutic, it was found that targeted therapeutics are highly preferred for this purpose. Targeted therapeutics as defined herein are therapeutically active compounds that specifically recognize tumor cells rather than all fast dividing cells or immune cell populations. Although agents targeting all dividing cells or affecting immune cell populations may be used in combination and could improve efficacy (cf. example 12.6.8, 12.6.9), they may interfere with immune cell populations that were required for a sustainable immunological tumor response. This problem was solved by use of an antibody targeting a protein which is specifically expressed by the tumor cells. Preferred targeted therapeutics are antibodies binding a protein which is specifically expressed by the tumor cells.

[1738] Preferably, the further therapeutically active compound or therapy is selected from
[1739] a) an antibody or a small molecule targeting a checkpoint protein, such as PD-(L)1 or CTLA-4,
[1740] b) a chemotherapeutic agent, preferably a taxane, paclitaxel, doxorubicin, cis-platin, carboplatin, oxaliplatin, or gemcitabine,
[1741] c) an antibody targeting a further chemokine receptor, such as CCR1, CCR2, CCR3, CCR4, CCR5, CCR6, CCR7, CCR8, CCR9, CCR10, CXCR1, CXCR2, CXCR3, CXCR4, CXCR5, CXCR6, CX3CR1 or CXCR1,
[1742] d) an antibody targeting a protein which is specifically expressed by the tumor cells,
[1743] e) an antibody or a small molecule targeting HER2 and/or EGFR,
[1744] f) a targeted kinase inhibitor, such as Sorafinib, Regorafenib, or MEKi-1,
[1745] g) the standard of care for any of head and neck cancer, breast cancer, gastric cancer, lung cancer, squamous cell carcinoma, esophageal tumor, melanoma, bladder cancer, liver cancer, and/or prostate cancer,
[1746] h) radiation therapy, and/or
[1747] i) (a compound or antibody for) depletion of intra-tumoral B cells, preferably CD19+ B cells.

[1748] Suitable taxanes may be selected e.g. from paclitaxel, abraxane, cabazitaxel, or docetaxel, or derivatives thereof.

[1749] Preferably, the dose of the further therapeutically active compound or therapy is the first dose of the mentioned further therapeutically active compound or therapy.

### ASPECT 32—Stratification Methods/Diagnostic Methods

[1750] As discussed elsewhere herein, the stratification steps described for the fourth embodiments according to the 22nd aspect may be used either as part of a method of treatment according to the 22^{nd} aspect, or are provided stand-alone as
[1751] a) a method to select subjects that will most likely profit from treatment with an anti-CCR8 antibody,
[1752] b) a diagnostic method for diagnosing a tumor as sensitive for treatment with an anti-CCR8 antibody, or
[1753] c) a method to monitor the treatment success for treatment with an anti-CCR8 antibody.

[1754] For the current aspect the antibody may be an antibody according to the current invention but may also be any therapeutically suitable anti-CCR8 antibody.

### Biomarker for Anti-CCR8 Antibody Treatment

[1755] So far, no biomarkers are available to predict or monitor the treatment success for anti-CCR8 antibodies. While the demonstrated mode of action suggests that CCR8 itself may serve as a possible biomarker, the inventors found that CCR8 levels are somewhat difficult to assess in a clinical setup or within clinical studies. To solve this pressing problem, the inventors generated hypothesis and could validate some of these as suitable biomarkers with excellent predictive power, see e.g. example 12.7.1 and 12.7.2. The level of marker expression is usually determined with an assay or a method known in the art and the level is subsequently compared with a reference value as described elsewhere herein and is subsequently used to predict or monitor the treatment response.

[1756] Provided is a biomarker for use in a method for diagnosing/stratifying a subject as having a tumor that is sensitive for treatment with an anti-CCR8 antibody, the use comprising
[1757] a. determining the level of the biomarker in a tumor or tumor sample comprising regulatory T cells,
[1758] b. comparing the level of the biomarker with a reference sample or value, and
[1759] c. diagnosing/stratifying a subject as having a tumor that is sensitive for treatment with an anti-CCR8 antibody, if the level of the biomarker is higher than or equal to a reference sample or value, wherein the biomarker is
[1760] d. an immune checkpoint protein, preferably PD-1, PD-L1 or CTLA4,
[1761] e. a granzyme or immune cell marker, preferably a marker for lymphocytes, effector cells, T cells, cytotoxic T cells, macrophage cells, M1 macrophage cells, M2 macrophage cells, B cells, NK cells, or a combination thereof,
[1762] f. a Treg infiltration marker, preferably CCR8, FOXP3, ICOS, CCR4, TIGIT, P2RY10, CD80, TNFRSF9, CD3(G), SLAMF1, IL7R, IL2RB, CTLA4, CD5, ITK, IL2RA, LAX1, IKZF3, GBP5, CXCR6, SIRPG, CD2, CSF2RB, SLAMF7 or CXCL9,
[1763] g. a T cell marker or cytotoxic T cell marker preferably selected from CD3, CD4, CD8, CD25, CXCR3, CCR5, 4-1BB, OX-40, or GITR,
[1764] h. an interferon or interferon-inducible protein preferably selected from IFN gamma, IL10, IL12p70, IL1beta, IL2 and TNF alpha,
[1765] i. a complement factor,
[1766] j. a serpin, and/or
[1767] k. a molecule derived from a gene according to Table 12.7.2.1, 12.7.2.2 or 12.7.2.3.

[1768] Preferably, the biomarker is an immune checkpoint protein, most preferably PD-1, PD-L1 or CTLA4. Also provided is the use of a biomarker to predict or monitor the therapeutic success of a therapy comprising the administration of an anti-CCR8 antibody, the use comprising
[1769] a. determining the level of the biomarker in a sample, and
[1770] b. comparing the level of the biomarker with a reference sample or value, wherein the biomarker is
[1771] c. an immune checkpoint protein, preferably PD-1, PD-L1 or CTLA4,
[1772] d. a granzyme or immune cell marker, preferably a marker for lymphocytes, effector cells, T cells, cytotoxic T cells, macrophage cells, M1 macrophage cells, M2 macrophage cells, B cells, NK cells, or a combination thereof
[1773] e. a Treg infiltration marker, preferably selected from FOXP3, ICOS, CCR4, TIGIT, P2RY10, CD80, TNFRSF9, CD3(G), SLAMF1, IL7R, IL2RB, CTLA4, CD5, ITK, IL2RA, LAX1, IKZF3, GBP5, CXCR6, SIRPG, CD2, CSF2RB, SLAMF7, CXCL9,
[1774] f. a T cell marker or cytotoxic T cell marker, preferably selected from CD3, CD4, CD8, CD25, CXCR3, CCR5, and TNF receptor super family members such as 4-1BB, OX-40, or GITR,
[1775] g. an interferon-inducible protein, preferably selected from IFN gamma, IL10, IL12p70, IL1beta, IL2 and TNF alpha,
[1776] h. a complement factor,
[1777] i. a serpin and/or
[1778] j. a molecule derived from a gene according to Table 12.7.2.1, 12.7.2.2 or 12.7.2.3.

[1779] Preferably, the biomarker is an immune checkpoint protein, most preferably PD-1, PD-L1 or CTLA4. Furthermore, there is also provided a molecule binding a biomarker for use in a method for diagnosing/stratifying a subject as having a tumor that is sensitive for treatment with an anti-CCR8 antibody, the use comprising determining the level of the biomarker in a tumor or tumor sample using the molecule binding the biomarker, wherein the biomarker is (preferably)
[1780] a. an immune checkpoint protein, preferably PD-1, PD-L1 or CTLA4,
[1781] b. a granzyme or immune cell marker, preferably a marker for lymphocytes, effector cells, T cells, cytotoxic T cells, macrophage cells, M1 macrophage cells, M2 macrophage cells, B cells, NK cells, or a combination thereof
[1782] c. a Treg infiltration marker, preferably CCR8, FOXP3, ICOS, CCR4, TIGIT, P2RY10, CD80, TNFRSF9, CD3(G), SLAMF1, IL7R, IL2RB, CTLA4, CD5, ITK, IL2RA, LAX1, IKZF3, GBP5, CXCR6, SIRPG, CD2, CSF2RB, SLAMF7 or CXCL9,
[1783] d. a T cell marker or cytotoxic T cell marker preferably selected from CD3, CD4, CD8, CD25, CXCR3, CCR5, 4-1BB, OX-40, or GITR,
[1784] e. an interferon or interferon-inducible protein preferably selected from IFN gamma, IL10, IL12p70, IL1beta, IL2 and TNF alpha,
[1785] f. a complement factor,
[1786] g. a serpin, and/or
[1787] h. a molecule derived from a gene according to Table 12.7.2.1, 12.7.2.2 or 12.7.2.3.

[1788] The molecule binding the biomarker is preferably an antibody or antigen-binding fragment, or a conjugate thereof. Most preferably, the molecule binding the biomarker is an anti-PD-1, PD-L1 or CTLA4 antibody such as Nivolumab, Pembrolizumab, Atezolizumab, Avelumab, Durvalumab, Cemiplimab, Dostarlimab or Ipilimumab.

[1789] Furthermore, there is also provided the use of a molecule binding a biomarker to predict or monitor the therapeutic success of a therapy comprising the administration of an anti-CCR8 antibody, the use comprising determining the level of the biomarker in a tumor or tumor sample using the molecule binding the biomarker, wherein the biomarker is (preferably)
[1790] a. an immune checkpoint protein, preferably PD-1, PD-L1 or CTLA4,
[1791] b. a granzyme or immune cell marker, preferably a marker for lymphocytes, effector cells, T cells, cytotoxic T cells, macrophage cells, M1 macrophage cells, M2 macrophage cells, B cells, NK cells, or a combination thereof,
[1792] c. a Treg infiltration marker, preferably CCR8, FOXP3, ICOS, CCR4, TIGIT, P2RY10, CD80, TNFRSF9, CD3(G), SLAMF1, IL7R, IL2RB, CTLA4, CD5, ITK, IL2RA, LAX1, IKZF3, GBP5, CXCR6, SIRPG, CD2, CSF2RB, SLAMF7 or CXCL9,
[1793] d. a T cell marker or cytotoxic T cell marker preferably selected from CD3, CD4, CD8, CD25, CXCR3, CCR5, 4-1BB, OX-40, or GITR,
[1794] e. an interferon or interferon-inducible protein preferably selected from IFN gamma, IL10, IL12p70, IL1beta, IL2 and TNF alpha,
[1795] f. a complement factor,
[1796] g. a serpin, and/or
[1797] h. a molecule derived from a gene according to Table 12.7.2.1, 12.7.2.2 or 12.7.2.3, and
   wherein the molecule binding the biomarker is preferably an antibody or antigen-binding fragment, or a conjugate thereof. Most preferably, the molecule binding the biomarker is an anti-checkpoint, anti-PD-1, anti-PD-L1 or anti-CTLA4 antibody such as Nivolumab, Pembrolizumab, Atezolizumab, Avelumab, Durvalumab, Cemiplimab, Dostarlimab or Ipilimumab.

[1798] In preferred embodiments of the current aspect, the biomarker is an immune cell marker, and the molecule binding a biomarker is preferably an antibody binding a marker for lymphocytes, effector cells, T cells, cytotoxic T cells, macrophage cells, M1 macrophage cells, M2 macrophage cells, B cells, NK cells, or a combination thereof.

[1799] In preferred embodiments of the current aspect, the molecule binding the biomarker is a molecule binding a Treg infiltration marker, preferably an antibody binding CCR8, FOXP3, ICOS, CCR4, TIGIT, P2RY10, CD80, TNFRSF9, CD3(G), SLAMF1, IL7R, IL2RB, CTLA4, CD5, ITK, IL2RA, LAX1, IKZF3, GBP5, CXCR6, SIRPG, CD2, CSF2RB, SLAMF7 or CXCL9.

[1800] In preferred embodiments of the current aspect, the molecule binding the biomarker is an antibody binding a T cell marker preferably selected from CD3, CD4, CD8, CD25, CXCR3, CCR5, and TNF receptor super family members including 4-1BB, OX-40, or GITR.

[1801] In preferred embodiments of the current aspect, the molecule binding the biomarker is an antibody binding an interferon or interferon-inducible protein preferably selected from INF gamma, IL10, IL12p70, IL1beta, IL2 and TNF alpha.

[1802] Immune checkpoint protein as biomarker for anti-CCR8 antibody treatment According to the current invention it was surprisingly found that the response to (mono) therapy with anti-CCR8 antibody was improved for subjects that were at least initially responsive to ICI treatment, and in particular to anti-PD-(L)1 or CTLA4 antibody treatment, see e.g. Table 12.7.1. Because PD-L1 expression is a predictor for responsiveness to anti-PD-L1 antibody treatment, the inventors hypothesized that PD-L1 expression and checkpoint protein expression per se might also be suitable to directly predict the response to anti-CCR8 antibody treatment. This hypothesis could be confirmed by correlation data between PD-L1 expression and anti-CCR8 antibody treatment response (Table 12.8.1). PD-L1 expression can be determined as known in the art, e.g. without limitation by using Tumor Proportion Score (TPS), Combined Positive Score (CPS), or mRNA expression. The inventors therefore suggest immune checkpoint marker and particularly PD-L1 as surrogate marker for stratification to overcome the problem that CCR8 is difficult to analyze and is therefore difficult to implement in order to select patient populations that could most likely benefit from anti-CCR8 antibody treatment.

[1803] Accordingly, there is provided a molecule binding an immune checkpoint protein for use in a method for diagnosing/stratifying a subject as having a tumor that is sensitive for treatment with an anti-CCR8 antibody, the method comprising
[1804] a. determining the level of the immune checkpoint protein expression in a tumor (sample),
[1805] b. comparing the level of immune checkpoint protein expression with a reference sample or value, and
[1806] c. diagnosing/stratifying a subject as having a tumor that is sensitive for treatment with an anti-CCR8 antibody, if the level of immune checkpoint protein expression is higher than or equal to a reference sample or value.

[1807] Furthermore, there is provided the use of a molecule binding an immune checkpoint protein for monitoring treatment success of anti-CCR8 antibody therapy, the method comprising
[1808] a. determining the level of the immune checkpoint protein expression in a tumor (sample)/a sample, and
[1809] b. comparing the level of immune checkpoint protein expression with a reference sample or value.

[1810] The molecule binding an immune checkpoint protein is preferably an antibody. The immune checkpoint protein is preferably PD-1, PD-L1 or CTLA4. The molecule binding an immune checkpoint protein is preferably an antibody binding PD-1, PD-L1 or CTLA4. For example, the antibody can be PD-L1 28-8, PD-L1 22C3, PD-L1 SP142, PD-L1 SP263 or any other suitable antibody known in the art as companion diagnostic. In particularly preferred embodiments, the level of checkpoint protein expression is determined based on Combined Positive Score (CPS) or Tumor Proportion Score (TPS). A subject or patients tumor is diagnosed/stratified as sensitive for treatment with an anti-CCR8 antibody, if immune checkpoint protein expression is present or high, e.g. as indicated by a CPS≥1, preferably by a CPS≥5, most preferably by a CPS≥10, or as indicated by a TPS≥1%, preferably by a TPS≥10%, most preferably by a TPS≥50%. Thus, in some preferred embodiments, the reference value is CPS=1, more preferably CPS=5 or most preferably CPS=10. In some other or the same preferred embodiments, the reference value is TPS=1%, more preferably TPS=10%, or most preferably TPS >50%.

[1811] In some preferred embodiments, PD-L1 expression is determined by a CPS≥1, preferably by a CPS≥5, most preferably by a CPS≥10 or is determined by a TPS≥1%, preferably by a TPS≥10%, most preferably by a TPS≥50%.

### Treg Infiltration Marker as Biomarker for Anti-CCR8 Antibody Treatment

[1812] There is provided a molecule binding a Treg infiltration marker for use in a method for diagnosing/stratifying a subject as having a tumor that is sensitive for treatment with an anti-CCR8 antibody, the method comprising
[1813] a. determining the level of the Treg infiltration marker expression in a tumor (sample),
[1814] b. comparing the level of the Treg infiltration marker expression with a reference sample or value, and
[1815] c. diagnosing/stratifying a subject as having a tumor that is sensitive for treatment with an anti-CCR8 antibody, if the level of the Treg infiltration marker is higher than or equal to a reference sample or value.

[1816] The Treg infiltration marker is a marker that is highly expressed on activated Tregs. Preferably, the Treg infiltration marker is selected from CCR8, FOXP3, ICOS, CCR4, TIGIT, P2RY10, CD80, TNFRSF9, CD3(G), SLAMF1, IL7R, IL2RB, CTLA4, CD5, ITK, IL2RA, LAX1, IKZF3, GBP5, CXCR6, SIRPG, CD2, CSF2RB, SLAMF7, CXCL9, cf. Table 11.1.1, Table 12.8.1. The Treg infiltration marker can be different from CCR8. The molecule binding a Treg infiltration marker is preferably an antibody, e.g. an antibody binding to one or more of the Treg infiltration markers.

[1817] The Treg infiltration marker disclosed herein may also be used as biomarker to control the treatment success, e.g. as described elsewhere herein. A treatment is considered successful, if a (temporary) Treg depletion of at least 40% or 50% is obtained, as indicated e.g. by a decrease of the Treg infiltration marker by a factor of 2.

### Immune Cell Marker as Biomarker for Anti-CCR8 Antibody Treatment

[1818] There is provided a molecule binding an immune cell marker for use in a method for diagnosing/stratifying a subject as having a tumor that is sensitive for treatment with an anti-CCR8 antibody, the method comprising
[1819] a. determining the level of the immune cell marker expression in a tumor (sample),
[1820] b. comparing the level of the immune cell marker expression with a reference sample or value, and
[1821] c. diagnosing/stratifying a subject as having a tumor that is sensitive for treatment with an anti-CCR8 antibody, if the level of the immune cell marker is higher than or equal to a reference sample or value.

[1822] The immune cell marker may be a marker for lymphocytes, effector cells, T cells, cytotoxic T cells, macrophage cells, M1 macrophage cells, M2 macrophage cells, B cells, NK cells, or a combination thereof. Suitable markers for these immune cell populations are described throughout this disclosure. For example, suitable T cell markers include CD3 (e.g. CD3E, D and/or G). For example, suitable cytotoxic T cell markers include CD8 (e.g. CD8A and/or B). For example, suitable macrophage cell markers include MS4A7. For example, suitable macrophage M1 cell markers include Acod1. For example, suitable M2 macrophage cell markers include Mrc1. For example, suitable B cell markers include CD19, CD20, CD22 and/or MSA41.

[1823] The immune cell marker disclosed herein may also be used as biomarker to control the treatment success, e.g. as Described Elsewhere Herein. A Treatment is Considered Successful, if a (temporary) Immune Cell increase occurs, e.g. of at least 50%, e.g. as indicated by an increase of the immune cell infiltration marker by a factor of at least 2.

### T Cell Marker as Biomarker for Anti-CCR8 Antibody Treatment

[1824] There is provided a molecule binding a T cell marker for use in a method for diagnosing/stratifying a subject as having a tumor that is sensitive for treatment with an anti-CCR8 antibody, the method comprising
[1825] a. determining the level of the T cell marker expression in a tumor (sample),
[1826] b. comparing the level of the T cell marker expression with a reference sample or value, and
[1827] c. diagnosing/stratifying a subject as having a tumor that is sensitive for treatment with an anti-CCR8 antibody, if the level of the T cell marker is higher than or equal to a reference sample or value.

[1828] The T cell marker may be a marker that is highly expressed on T cells, such as activated T cells. Preferably, the T cell marker is selected from CD3, CD4, CD8, CD25, CXCR3, CCR5, and TNF receptor super family members including 4-1BB, OX-40, or GITR. The molecule binding the T cell marker is preferably an antibody, e.g. an antibody binding to one or more of the T cell markers disclosed herein.

[1829] The T cell marker disclosed herein may also be used as biomarker to control the treatment success, alone or in combination with a Treg infiltration marker, e.g. as described elsewhere herein. A treatment is considered successful, if a (temporary) T cell increase occurs, e.g. of at least 50%, e.g. as indicated by an increase of the T cell marker by a factor of at least 2.

### Interferon or Interferon-Inducible Protein as Biomarker for Anti-CCR8 Antibody Treatment

[1830] There is provided an interferon or interferon-inducible protein for use in a method for diagnosing/stratifying a subject as having a tumor that is sensitive for treatment with an anti-CCR8 antibody or for monitoring treatment success, the method comprising
[1831] a. determining the level of interferon or interferon-inducible protein in a tumor (sample),
[1832] b. comparing the level of the interferon or interferon-inducible protein with a reference sample or value, and
[1833] c. diagnosing/stratifying a subject as having a tumor that is sensitive for treatment with an anti-CCR8 antibody, if the level interferon or interferon-inducible protein is higher than or equal to a reference sample or value.

[1834] The interferon or interferon-inducible proteins is preferably selected from IFN gamma, IL10, IL12p70, IL1beta, IL2 and TNF alpha. According to the current invention it was found that the correlation of CCR8 mRNA expression with inflammation marker IFN gamma was significant for 50 tumor indications, cf.

[1835] Table 11.1.2. From this it can be concluded that IFN gamma levels may be suitable as biomarkers as disclosed herein. This was confirmed e.g. in example 12.6.2, where IFN gamma and also TNF alpha levels correlated with treatment response. In a different experiment (example 12.6.6), increased levels of IFN gamma, IL-1b and IL-2 were associated with improved efficacy. Suitable interferon-stimulated genes or proteins include without limitation ACOD1, ACTG1, ACTR2, ACTR3, ADAMTS13, AIF1, AQP4, ASS1, B2M, BST2, C9JQL5, CALCOCO2, CAMK2A, CAMK2B, CAMK2D, CAMK2G, CASP1, CCL1, CCL11, CCL13, CCL14, CCL15, CCL15, CCL14, CCL16, CCL17, CCL18, CCL19, CCL2, CCL20, CCL21, CCL22, CCL23, CCL24, CCL25, CCL26, CCL3, CCL3L1, CCL4, CCL4L1, CCL5, CCL7, CCL8, CD40, CD44, CD58, CDC42EP2, CDC42EP4, CIITA, CITED1, CLDN1, CX3CL1, CXCL16, CYP27B1 DAPK1, DAPK3, EDN1, EPRS, EVL, FCGR1A, FCGR1B, FLNB, GAPDH, GBP1, GBP2, GBP4, GBP5, GBP6, GCH1, GSN, HCK, HLA-A, HLA-B, HLA-C, HLA-DPA1, HLA-DPB1, HLA-DQA1, HLA-DQA2, HLA-DQB1, HLA-DQB2, HLA-DRA HLA-DRB1, HLA-DRB3, HLA-DRB4, HLA-DRB5, HLA-E, HLA-F, HLA-G, HLA-H, ICAM1, IFI30, IFITM1, IFITM2, IFITM3, IFNG, IFNGR1, IFNGR2, IL12B, IL12RB1 IL23R, IRF1, IRF2, IRF3, IRF4, IRF5, IRF6, IRF7, IRF8, IRF9, JAK1, JAK2, KIF16B, KIF5B, KYNU, LGALS9, MEFV, MID1, MRC1, MT2A, MYO1C, NCAM1, NMI, NOS2, NUB1, OAS1, OAS2, OAS3, OASL, PDE12, PML, PRKCD, PTAFR, RAB12, RAB20, RAB43, RAB7B, RPL13A, RPS6KB1 RYDEN, SEC61A1 SLC11A1 SLC26A6 SLC30A8 SNCA, SP100, STAR, STAT1, STX4, STX8, STXBP1, STXBP2, STXBP3, STXBP4, SYNCRIP TDGF1, TLR2, TLR3, TLR4, TRIM21, TRIM22, TRIM25, TRIM26, TRIM31, TRIM34, TRIM38, TRIMS, TRIM62, TRIM68, TRIMS, UBD, VAMP3, VCAM1, VIM, VPS26B, WAS, WNT5A, XCL1, XCL2, ZYX.

### EXAMPLES

### Example 1: Alignment CC Chemokine Receptors & CXC Chemokine Receptors

[1836] Human CC and CXC chemokine receptor sequences were retrieved from Uniprot and aligned with Clustal Omega. Results were imported in Jalview for visualization (FIG. 1). Negative amino acid residues E and D (grey), as well as tyrosine residues (Y, dark grey) and cysteine residues (C, light grey) are highlighted. While the N terminal domains deviate in sequence, they are characterized by a comparably high number of negatively charged amino acids and tyrosine residues.

### Example 2: Alignment of Human, Cynomolgus and Murine CCR8

[1837] Human CCR8, cynomolgus CCR8 and murine CCR8 sequences were retrieved from Uniprot and aligned with Clustal Omega. Results were imported in Jalview for visualization and calculation of sequence identity, see FIG. 2a. While pairwise alignment of human and cynomolgus CCR8 yields a sequence identity of 94.37%, percentages are considerably lower between mouse and human CCR8 (Percentage ID=70.99), as well as between mouse and cynomolgus CCR8 (Percentage ID=71.55). Substantial differences can be observed in N term (TRD) region and C term region.

[1838] The sequence homology between the cynomolgus TRD and the human TRD is 68%, while sequence homology between the murine TRD and the human TRD is 52%. Nevertheless, the acidic and tyrosine-sulfated TRD shows a negatively charged cluster which was successfully used to generate cross-reactive antibodies, see example 6. At least the MDYT and YYPD motifs were found to be conserved between the species.

### Example 3: Evaluation of Prior Art Antibodies for Specific Binding to CCR8

[1839] FACS experiments were performed using CCR8 expressing cell lines to evaluate multiple prior art antibodies which are commercially sold as CCR8 binding for their specificity and staining to CCR8. Mouse T lymphoma cell line BW5147.4 expresses murine CCR8 and human cutaneous T lymphoma, HuT78 expresses low levels of human CCR8. Prior art antibodies for chemokine receptors and in particular for CCR8 often suffer from low specificity as described e.g. by Xing et al., Appl IHC Mol Morphol (2015): “We were unable to evaluate CCR8 expression by immunohistochemistry due to lack of specificity of available antibodies in our experience and as previously published by others.”, Chenivesse et al., J I (2012): “We were unable to evaluate the attraction of CD4+CCR8+ cells by CCL18 because of the lack of specificity of all commercially available anti-CCR8 Abs, which did not allow cell sorting, at least in our hands.”, or Pease, Biochem J (2011):“The latter has been problematic due to the lack of a seemingly reliable antibody against human CCR8. For example, in one study examining CCR8 expression on a population of CD4+CD25+ Tregs, CCR8 surface staining was undetectable using a commercially available antibody, although the cells evidently expressed functional CCR8, as assessed by CCL1-driven actin polymerization.” (cf. Xing, Xiaoming, et al. “Expression of the chemokine receptor gene, CCR8, is associated With DUSP22 rearrangements in anaplastic large cell lymphoma.” Applied immunohistochemistry & molecular morphology: AIMM/official publication of the Society for Applied Immunohistochemistry 23.8 (2015): 580; Chenivesse, Cécile, et al. “Pulmonary CCL18 recruits human regulatory T cells.” The Journal of Immunology 189.1 (2012): 128-137; and Pease, James E. “Targeting chemokine receptors in allergic disease.” Biochemical Journal 434.1 (2011): 11-24).

[1840] Table 3.1 lists three analyzed commercially available antibodies, which did not specifically stain CCR8 in the inventors' hands (cf. FIG. 3). Rat IgG2B Clone #191704 (MAB1429, R&D systems) did not show specific binding of human CCR8 and this is also in agreement with the observations described in Example 6 of WO2007044756. Abcam E77 showed very weak signal and high background (data not shown). MM0068-4G19 (Abeam), 191704 (R&D Systems), 4G19 (Biozol (Genetex)) and 11n24 and 10k39 (both antikoerper-online.de) did not show specific binding of human CCR8 in the inventors' hands.

TABLE 3.1
Selected prior art antibodies, cf. FIG. 3.

| Vendor | Angioproteomie | R&D | R&D |
|---|---|---|---|
| Item | Rat anti-human | Monoclonal | Recombinant |
| | CCR8 | rat anti-human | Monoclonal |
| | [MM0068-4G19] | CCR8 Ab | Rabbit IgG |
| | | | Clone # 1055C |
| Catalog | hAP-0068 | MAB1429-100 | MAB8324 |
| Number | | | |
| Immunogen | Human CCR8 | BaF3 mouse | HEK293 human |
| | transfected | pro-B cell line | embryonic |
| | 293 cells | transfected | kidney cell line |
| | | with human | transfected |
| | | CCR8 | with mouse CCR8 |
| | | Met1-Leu355 | |
| | | Accession # P51685 | |
| Reactivity | Human | Human | mouse |
| Antigen | CCR8 | CCR8 | CCR8 |
| Applications | FACS | neutralize | Stains by FACS |
| | | CCL1-induced | mouse CCR8 |
| | | chemotaxis ND₅₀ | transfectants but |
| | | 0.01-0.05 μg/mL | not irrelevant |
| | | | transfectants |
| Host | rat | rat | rabbit |
| Isotype | Rat IgG2 | Rat IgG_{2B} Clone # 191704 | Clone # 1055C |

[1841] The inventors found only two reliable monoclonal antibodies in the prior art which specifically bound to human CCR8: Clone 433H developed by ICOS and initially disclosed in WO2007044756 and L263G8 provided and sold by Biolegend. Both antibodies were generated using cells overexpressing human CCR8 as immunogen. L263G8 is not cross reactive for murine CCR8 and did not bind to murine CCR8 in BW5147.3 cells or HEK 293T cells transfected with mCCR8.

[1842] Monoclonal Rat IgG2b, κ anti-mouse CCR8 clone SA214G2 (Biolegend Catalog No. 150302) stained positive for murine CCR8 expressing BW5147.4 cells. This antibody was generated based on cells transfected with murine CCR8.

[1843] In summary, antibodies specifically recognizing human CC chemokine receptors are rare for some members of this target class. The low rates are in line with results for further commercially available antibodies sold for human chemokine receptors.

### Example 4: Antigens for CC and CXC Chemokine Receptors

[1844] Because the literature on tyrosine sulfation is incomplete and partially contradictory, e.g. between species, the inventors used various available tools, literature search and own experiences to predict sulfation sites. Table 4.1 summarizes the resulting polypeptides suitable as antigens to obtain improved antibodies for the respective chemokine receptors. These antigens were successfully used for antibody generation, e.g. as shown in the subsequent examples, either as antigens or for off target panning. Underlined sulfation sites were confirmed with an E-cuttoff value of 55 by applying the algorithm according to Monigatti F. et al. (Monigatti, Flavio, et al. “The Sulfinator: predicting tyrosine sulfation sites in protein sequences.” Bioinformatics 18.5 (2002): 769-770). None of the sequences had previously been included in the training set for the hidden markov models.

[1845] Sulfation of tyrosines in brackets can be omitted. For human CCR3 and human CCR8, additional sulfation sites were predicted for Y172 and Y353, respectively. For monkey CCR3 and monkey CCR2 additional sulfation sites were predicted for Y172 and Y188, respectively. Sulfation sites shown in bold have been previously described in literature (cf. Liu, Justin, et al. “Tyrosine sulfation is prevalent in human chemokine receptors important in lung disease.” American journal of respiratory cell and molecular biology 38.6 (2008): 738-743; Millard; Christopher J., et al. “Structural basis of receptor sulfotyrosine recognition by a CC chemokine: the N-terminal region of CCR3 bound to CCL11/eotaxin-1.” Structure 22.11 (2014): 1571-1581).

[1846] Peptide Design

[1847] The N term for CCR8 is formed by the amino acids 1 to 35 within the human and cynomolgus CCR8 full length protein and by amino acids 1 to 33 for the mouse CCR8 full length protein. The N term consists of the TRD (amino acids 1-24 for human and cynomolgus CCR8 and amino acids 1-22 for mouse CCR8), and the LID domain (amino acids 26-35 for human and cynomolgus CCR8 and amino acids 24-33 for mouse CCR8), which are connected by a cysteine. For the synthesis of polypeptides comprising the N term, the cysteine was replaced by a serine to avoid aggregation of the peptides. Table 5.1 shows the respective IDs of the polypeptides which were used for generation of anti-CCR8 antibodies by phage display panning as described in Example 6. To test if posttranslational modifications of proteins were causing the difficulties for the antibody generation, peptides comprising TRD and/or N term sequences were used, which were either unmodified or sulfated. Sulfation on the cynomolgus and human TRD of CCR8 were introduced on at least 50% of the tyrosines, e.g. on the positions 3, 15 and 17 of the respective peptides. For the mouse TRD and N term peptides, sulfations were introduced on the tyrosines at position 3, 14 and 15 of the respective peptides (cf. Table 6.1). In addition, peptides comprising the LID where engineered by introduction of a C-terminal biotinylation that was attached via a TTDS (Trioxatridecan-succinamic acid) linker. Other tags and linkers can also be used. The peptides for the TRD or N term were modified by introduction of a N-terminal biotinylation attached via a TTDS-Lysin linker. Again, further known linker and/or tags can likewise be used to facilitate immobilization of the peptides.

TABLE 4.1
Polypeptides for antigen or off target panning for generation of chemokine receptor antibodies. At least one sulfation at one of the listed
tyrosine positions of the polypeptide is required according to the invention, but sulfations at two three or more sites are also possible and
may be beneficial. X can be any amino acid or no amino acid, and preferably, is an amino acid different from cysteine, such as serine.

| SEQ | | | | | | | |
|---|---|---|---|---|---|---|---|
| ID | Anti- | | | Sulfation | | | |
| NO: | gen | Species | Domain | sites | Sequence | Length | Additional modifications (optional) |
| 1 | CCR1 | HUMAN | TRD | Y10, Y18 | METPNTTEDYDTTTEFDYGDATP | 23 | N-terminal biotinylation (e.g. via TTDS_Lysin |
| | | | | | | | linker) |
| 2 | CCR1 | MACFA | TRD | Y10, Y18 | METPDTTENYDMITEFDYGDATP | 23 | N-terminal biotinylation (e.g. via TTDS_Lysin |
| | | | | | | | linker) |
| 3 | CCR1 | MOUSE | TRD | Y10, Y18 | MEISDFTEAYPTTTEFDYGDSTP | 23 | N-terminal biotinylation (e.g. via TTDS_Lysin |
| | | | | | | | linker) |
| 4 | CCR1 | HUMAN | N term | Y10, Y18 | METPNTTEDYDTTTEFDYGDATPXQ | 34 | N-terminal biotinylation (e.g. via TTDS_Lysin |
| | | | | | KVNERAFGA | | linker); C24S (to avoid aggregation) |
| 5 | CCR1 | MACFA | N term | Y10, Y18 | METPDTTENYDMITEFDYGDATPXH | 34 | N-terminal biotinylation (e.g. via TTDS_Lysin |
| | | | | | KVNERAILA | | linker); C24S (to avoid aggregation) |
| 6 | CCR1 | MOUSE | N term | Y10, Y18 | MEISDFTEAYPTTTEFDYGDSTPXQK | 34 | N-terminal biotinylation (e.g. via TTDS_Lysin |
| | | | | | TAVRAFGA | | linker); C24S (to avoid aggregation) |
| 7 | CCR2 | HUMAN | TRD | Y26, Y28 | MLSTSRSRFIRNTNESGEEVTTFFDYD | 31 | N-terminal biotinylation (e.g. via TTDS_Lysin |
| | | | | | YGAP | | linker) |
| 8 | CCR2 | MACMU | TRD | Y26, Y28 | MLSTSRSRFIRNINGSGEEVTTFFDYD | 31 | N-terminal biotinylation (e.g. via TTDS_Lysin |
| | | | | | YGAP | | linker) |
| 9 | CCR2 | MOUSE | TRD | Y37, Y39 | MEDNNMLPQFIHGILSTSHSLFTRSIQ | 44 | N-terminal biotinylation |
| | | | | | ELDEGATTPYDYDDGEP | | (e.g. via TTDS Lysin linker) |
| 10 | CCR2 | HUMAN | N term | Y26, Y28 | MLSTSRSRFIRNTNESGEEVTTFFDYD | 42 | N-terminal biotinylation (e.g. via TTDS_Lysin |
| | | | | | YGAPXHKFDVKQIGA | | linker); C32S (to avoid aggregation) |
| 11 | CCR2 | MACMU | N term | Y26, Y28 | MLSTSRSRFIRNINGSGEEVTTFFDYD | 42 | N-terminal biotinylation (e.g. via TTDS_Lysin |
| | | | | | YGAPXHKFDVKQIGA | | linker); C32S (to avoid aggregation) |
| 12 | CCR2 | MOUSE | N term | Y37, Y39 | MEDNNMLPQFIHGILSTSHSLFTRSIQ | 55 | N-terminal biotinylation (e.g. via TTDS_Lysin |
| | | | | | ELDEGATTPYDYDDGEPXHKTSVKQI | | linker); C45S (to avoid aggregation) |
| | | | | | GA | | |
| 13 | CCR3 | HUMAN | TRD | Y16, Y17 | MTTSLDTVETFGTTSYYDDVGLL | 23 | N-terminal biotinylation (e.g. via TTDS_Lysin |
| | | | | | | | linker) |
| 14 | CCR3 | MACFA | TRD | Y16 | MTTSLDTVETFGPTSYDDDMGLL | 23 | N-terminal biotinylation (e.g. via TTDS_Lysin |
| | | | | | | | linker) |
| 15 | CCR3 | MOUSE | TRD | Y20, Y22 | MAFNTDEIKTVVESFETTPYEYEWAP | 27 | N-terminal biotinylation (e.g. via TTDS_Lysin |
| | | | | | P | | linker) |
| 16 | CCR3 | HUMAN | N term | Y16, Y17 | MTTSLDTVETFGTTSYYDDVGLLXEK | 34 | N-terminal biotinylation (e.g. via TTDS_Lysin |
| | | | | | ADTRALMA | | linker); C24S (to avoid aggregation) |
| 17 | CCR3 | MACFA | N term | Y16 | MTTSLDTVETFGPTSYDDDMGLLXE | 34 | N-terminal biotinylation (e.g. via TTDS_Lysin |
| | | | | | KADVGALIA | | linker); C24S (to avoid aggregation) |
| 18 | CCR3 | MOUSE | N term | Y20, Y22 | MAFNTDEIKTVVESFETTPYEYEWAP | 38 | N-terminal biotinylation (e.g. via TTDS_Lysin |
| | | | | | PXEKVRIKELGS | | linker); C28S (to avoid aggregation) |
| 19 | CCR4 | HUMAN | TRD | (Y16, Y19, | MNPTDIADTTLDESIYSNYYLYESIPK | 28 | N-terminal biotinylation (e.g. via TTDS_Lysin |
| | | | | Y20), Y22 | P | | linker) |
| 20 | CCR4 | MACFA | TRD | (Y16, Y19, | MNPTDIADTTLDESIYSNYYLYESIPK | 28 | N-terminal biotinylation (e.g. via TTDS_Lysin |
| | | | | Y20), Y22 | P | | linker) |
| 21 | CCR4 | MOUSE | TRD | (Y16, Y19, | MNATEVTDTTQDETVYNSYYFYESM | 28 | N-terminal biotinylation (e.g. via TTDS_Lysin |
| | | | | Y20), Y22 | PKP | | linker) |
| 22 | CCR4 | HUMAN | N term | (Y16, Y19, | MNPTDIADTTLDESIYSNYYLYESIPK | 39 | N-terminal biotinylation (e.g. via TTDS_Lysin |
| | | | | Y20), Y22 | PXTKEGIKAFGE | | linker); C29S (to avoid aggregation) |
| 23 | CCR4 | MACFA | N term | (Y16, Y19, | MNPTDIADTTLDESIYSNYYLYESIPK | 39 | N-terminal biotinylation (e.g. via TTDS_Lysin |
| | | | | Y20), Y22 | PXTKEGIKAFGE | | linker); C29S (to avoid aggregation) |
| 24 | CCR4 | MOUSE | N term | (Y16, Y19, | MNATEVTDTTQDETVYNSYYFYESM | 39 | N-terminal biotinylation (e.g. via TTDS_Lysin |
| | | | | Y20), Y22 | PKPXTKEGIKAFGE | | linker); C29S (to avoid aggregation) |
| 25 | CCR5 | HUMAN | TRD | Y3, Y10, | MDYQVSSPIYDINYYTSEP | 19 | N-terminal biotinylation (e.g. via TTDS_Lysin |
| | | | | (Y14, Y15 | | | linker) |
| 26 | CCR5 | MACFA | TRD | Y3, Y10, | MDYQVSSPTYDIDYYTSEP | 19 | N-terminal biotinylation (e.g. via TTDS_Lysin |
| | | | | Y14, Y15 | | | linker) |
| 27 | CCR5 | MOUSE | TRD | Y10, Y12, | MDFQGSVPTYSYDIDYGMSAP | 21 | N-terminal biotinylation (e.g. via TTDS_Lysin |
| | | | | Y16 | | | linker) |
| 28 | CCR5 | HUMAN | N term | Y3, Y10, | MDYQVSSPIYDINYYTSEPXQKINVK | 30 | N-terminal biotinylation (e.g. via TTDS_Lysin |
| | | | | Y14, Y15 | QIAA | | linker); C20S (to avoid aggregation) |
| 29 | CCR5 | MACFA | N term | Y3, Y10, | MDYQVSSPTYDIDYYTSEPXQKINVK | 30 | N-terminal biotinylation (e.g. via TTDS_Lysin |
| | | | | Y14, Y15 | QIAA | | linker); C20S (to avoid aggregation) |
| 30 | CCR5 | MOUSE | N term | Y10, Y12, | MDFQGSVPTYSYDIDYGMSAPXQKIN | 32 | N-terminal biotinylation (e.g. via TTDS_Lysin |
| | | | | Y16 | VKQIAA | | linker); C22S (to avoid aggregation) |
| 31 | CCR6 | HUMAN | TRD | Y18, Y26, | MSGESMNFSDVFDSSEDYFVSVNTSY | 35 | N-terminal biotinylation (e.g. via TTDS_Lysin |
| | | | | Y27 | YSVDSEMLL | | linker) |
| 32 | CCR6 | MACFA | TRD | Y23, Y31, | MFLPTMSGESMNFSDVFDSSEDYFAS | 40 | N-terminal biotinylation (e.g. via TTDS Lysin |
| | | | | Y32 | VNTSYYTVDSEMLL | | linker) |
| 33 | CCR6 | MOUSE | TRD | (Y7), Y13, | MNSTESYFGTDDYDNTEYYSIPPDHG | 27 | N-terminal biotinylation (e.g. via TTDS_Lysin |
| | | | | Y18, Y19 | P | | linker) |
| 34 | CCR6 | HUMAN | N term | Y18, Y26, | MSGESMNFSDVFDSSEDYFVSVNTSY | 47 | N-terminal biotinylation (e.g. via TTDS_Lysin |
| | | | | Y27 | YSVDSEMLLXSLQEVRQFSRL | | linker); C36S (to avoid aggregation) |
| 35 | CCR6 | MACFA | N term | Y23, Y31, | MFLPTMSGESMNFSDVFDSSEDYFAS | 52 | N-terminal biotinylation (e.g. via TTDS_Lysin |
| | | | | Y32 | VNTSYYTVDSEMLLXTLHEVRQFSRL | | linker); C41S (to avoid aggregation) |
| 36 | CCR6 | MOUSE | N term | (Y7), Y13, | MNSTESYFGTDDYDNTEYYSIPPDHG | 39 | N-terminal biotinylation (e.g. via TTDS_Lysin |
| | | | | Y18, Y19 | PXSLEEVRNFTKV | | linker); C28S (to avoid aggregation) |
| 37 | CCR7 | HUMAN | TRD | Y8, Y17 | QDEVTDDYIGDNTTVDYTLFESL | 23 | N-terminal biotinylation (e.g. via TTDS_Lysin |
| | | | | | | | linker) |
| 38 | CCR7 | MACFA | TRD | Y8, Y17 | QDEVTDDYIGDNTTVDYTLFESL | 23 | N-terminal biotinylation (e.g. via TTDS_Lysin |
| | | | | | | | linker) |
| 39 | CCR7 | MOUSE | TRD | Y8, Y17, | QDEVTDDYIGENTTVDYTLYESV | 23 | N-terminal biotinylation (e.g. via TTDS_Lysin |
| | | | | Y20 | | | linker) |
| 40 | CCR7 | HUMAN | N term | Y8, Y17 | QDEVTDDYIGDNTTVDYTLFESLXSK | 35 | N-terminal biotinylation (e.g. via TTDS_Lysin |
| | | | w/o | | KDVRNFKAW | | linker); C24S (to avoid aggregation) |
| | | | Signal | | | | |
| | | | Peptide | | | | |
| 41 | CCR7 | MACFA | N term | Y8, Y17 | QDEVTDDYIGDNTTVDYTLFESLXSK | 35 | N-terminal biotinylation (e.g. via TTDS_Lysin |
| | | | w/o | | KDVRNFKAW | | linker); C24S (to avoid aggregation) |
| | | | Signal | | | | |
| | | | Peptide | | | | |
| 42 | CCR7 | MOUSE | N term | Y8, Y17, | QDEVTDDYIGENTTVDYTLYESVXFK | 35 | N-terminal biotinylation (e.g. via TTDS_Lysin |
| | | | w/o | Y20 | KDVRNFKAW | | linker); C24S (to avoid aggregation) |
| | | | Signal | | | | |
| | | | Peptide | | | | |
| 43 | CCR8 | HUMAN | TRD | Y3, Y15, | MDYTLDLSVTTVTDYYYPDIFSSP | 24 | N-terminal biotinylation (e.g. via TTDS_Lysin |
| | | | | (16), Y17 | | | linker) |
| 44 | CCR8 | MACFA | TRD | Y3, Y15, | MDYTLDPSMTTMTDYYYPDSLSSP | 24 | N-terminal biotinylation (e.g. via TTDS_Lysin |
| | | | | (16), Y17 | | | linker) |
| 45 | CCR8 | MOUSE | TRD | Y3, Y14, | MDYTMEPNVTMTDYYPDFFTAP | 22 | N-terminal biotinylation (e.g. via TTDS_Lysin |
| | | | | Y15 | | | linker) |
| 46 | CCR8 | HUMAN | N term | Y3, Y15, | MDYTLDLSVTTVTDYYYPDIFSSPXD | 35 | N-terminal biotinylation (e.g. via TTDS_Lysin |
| | | | | (16), Y17 | AELIQTNGK | | linker); C25S (to avoid aggregation) |
| 47 | CCR8 | MACFA | N term | Y3, Y15, | MDYTLDPSMTTMTDYYYPDSLSSPX | 35 | N-terminal biotinylation (e.g. via TTDS_Lysin |
| | | | | (16), Y17 | DGELIQRNDK | | linker); C25S (to avoid aggregation) |
| 48 | CCR8 | MOUSE | N term | Y3, Y14, | MDYTMEPNVTMTDYYPDFFTAPXDA | 33 | N-terminal biotinylation (e.g. via TTDS_Lysin |
| | | | | Y15 | EFLLRGSM | | linker); C23S (to avoid aggregation) |
| 49 | CCR8 | HUMAN | LID | | DAELIQTNGK | 10 | NA |
| 50 | CCR8 | MACFA | LID | | DGELIQRNDK | 10 | NA |
| 51 | CCR8 | MOUSE | LID | | DAEFLLRGSM | 10 | NA |
| 52 | CCR8 | HUMAN | ECL1 | | YLLDQWVFGTVMCK | 14 | NA |
| 53 | CCR8 | MACFA | ECLI | | YQLDQWVFGTVMCK | 14 | NA |
| 54 | CCR8 | MOUSE | ECLI | | NLLDQWVFGTAMCK | 14 | NA |
| 55 | CCR8 | HUMAN | ECL2 | | YQVASEDGVLQCYSFYNQQTLKWKI | 31 | NA |
| | | | | | FTNFKM | | |
| 56 | CCR8 | MACFA | ECL2 | | YQVASEDGVLQCYSFYNQQTLKWKI | 31 | NA |
| | | | | | FTNFEM | | |
| 57 | CCR8 | MOUSE | ECL2 | | YQVASEDGMLQCFQFYEEQSLRWKL | 31 | NA |
| | | | | | FTHFEI | | |
| 58 | CCR8 | HUMAN | ECL3 | | HSMHILDGCSISQQLTY | 17 | NA |
| 59 | CCR8 | MACFA | ECL3 | | HSMHILDGCSISQQLNY | 17 | NA |
| 60 | CCR8 | MOUSE | ECL3 | | HDLHILDGCATRORLAL | 17 | NA |
| 61 | CCR9 | HUMAN | TRD | Y17, Y28, | MTPTDFTSPIPNMADDYGSESTSSME | 37 | N-terminal biotinylation (e.g. via TTDS_Lysin |
| | | | | Y37 | DYVNFNFTDFY | | linker) |
| 62 | CCR9 | MACFA | TRD | Y17, Y28, | MTPTEFTSPVPNMADDYGSESTSSME | 37 | N-terminal biotinylation (e.g. via TTDS_Lysin |
| | | | | Y37 | DYVNFNFTDFY | | linker) |
| 63 | CCR9 | MOUSE | TRD | Y19, Y28 | MTPTEFTSPVPNMADDYGSESTSSME | 37 | N-terminal biotinylation (e.g. via TTDS_Lysin |
| | | | | | DYVNFNFTDFY | | linker) |
| 64 | CCR9 | HUMAN | N term | Y17, Y28, | MTPTDFTSPIPNMADDYGSESTSSME | 48 | N-terminal biotinylation (e.g. via TTDS_Lysin |
| | | | | Y37 | DYVNFNFTDFYXEKNNVRQFAS | | linker); C38S (to avoid aggregation) |
| 65 | CCR9 | MACFA | N term | Y17, Y28, | MTPTEFTSPVPNMADDYGSESTSSME | 48 | N-terminal biotinylation (e.g. via TTDS_Lysin |
| | | | | Y37 | DYVNFNFTDFYXEKNNVRQFAS | | linker); C38S (to avoid aggregation) |
| 66 | CCR9 | MOUSE | N term | Y19, Y28 | MTPTEFTSPVPNMADDYGSESTSSME | 48 | N-terminal biotinylation (e.g. via TTDS_Lysin |
| | | | | | DYVNFNFTDFYXEKNNVRQFAS | | linker); C38S (to avoid aggregation) |
| 67 | CCR10 | HUMAN | TRD | Y14, Y22 | MGTEATEQVSWGHYSGDEEDAYSAE | 30 | N-terminal biotinylation (e.g. via TTDS_Lysin |
| | | | | | PLPEL | | linker) |
| 68 | CCR10 | MACFA | TRD | Y14, Y22 | MGTEATEQVSWGHYSGDEEEAYSAE | 30 | N-terminal biotinylation (e.g. via TTDS_Lysin |
| | | | | | PLPEL | | linker) |
| 69 | CCR10 | MOUSE | TRD | Y14, Y17, | MGTKPTEQVSWGLYSGYDEEAYSVG | 30 | N-terminal biotinylation |
| | | | | Y22 | PLPEL | | (e.g. via TTDS Lysin linker) |
| 70 | CCR10 | HUMAN | N term | Y14, Y22 | MGTEATEQVSWGHYSGDEEDAYSAE | 52 | N-terminal biotinylation (e.g. via TTDS_Lysin |
| | | | | | PLPELXYKADVQAFSRAFQPSVSLTV | | linker); C31S (to avoid aggregation) |
| | | | | | A | | |
| 71 | CCR10 | MACFA | N term | Y14, Y22 | MGTEATEQVSWGHYSGDEEEAYSAE | 52 | N-terminal biotinylation (e.g. via TTDS_Lysin |
| | | | | | PLPELXYKADVQAFSRAFQPSVSLTV | | linker); C31S (to avoid aggregation) |
| | | | | | A | | |
| 72 | CCR10 | MOUSE | N term | Y14, Y17, | MGTKPTEQVSWGLYSGYDEEAYSVG | 48 | N-terminal biotinylation ( e.g. via TTDS_Lysin |
| | | | | Y22 | PLPELXYKADVQAFSRAFQPSVS | | linker); C31S (to avoid aggregation) |
| 73 | CXCR1 | HUMAN | TRD | Y27 | MSNITDPQMWDFDDLNFTGMPPADE | 29 | N-terminal biotinylation (e.g. via TTDS_Lysin |
| | | | | | DYSP | | linker) |
| 74 | CXCR1 | MACFA | TRD | Y14, Y28 | MSNATDPQMGDDDYDLNFTGMPPT | 30 | N-terminal biotinylation (e.g. via TTDS_Lysin |
| | | | | | DEDYSP | | linker) |
| 75 | CXCR1 | MOUSE | TRD | Y6, Y32 | MAEAEYFIWTNPEGDFEKEFGNITGM | 35 | N-terminal biotinylation (e.g. via TTDS_Lysin |
| | | | | | LPTGDYFIP | | linker) |
| 76 | CXCR1 | HUMAN | N term | Y27 | MSNITDPQMWDFDDLNFTGMPPADE | 39 | N-terminal biotinylation (e.g. via TTDS_Lysin |
| | | | | | DYSPXMLETETLNK | | linker); C30S (to avoid aggregation) |
| 77 | CXCR1 | MACFA | N term | Y14, Y28 | MSNATDPQMGDDDYDLNFTGMPPT | 40 | N-terminal biotinylation (e.g. via TTDS_Lysin |
| | | | | | DEDYSPXRLETQSLNK | | linker); C31S (to avoid aggregation) |
| 78 | CXCR1 | MOUSE | N term | Y6, Y32 | MAEAEYFIWTNPEGDFEKEFGNITGM | 44 | N-terminal biotinylation (e.g. via TTDS_Lysin |
| | | | | | LPTGDYFIPXKRVPITNR | | linker); C36S (to avoid aggregation) |
| 79 | CXCR2 | HUMAN | TRD | Y23, Y25 | MEDFNMESDSFEDFWKGEDLSNYSY | 38 | N-terminal biotinylation (e.g. via TTDS_Lysin |
| | | | | | SSTLPPFLLDAAP | | linker) |
| 80 | CXCR2 | MACMU | TRD | Y20, Y22 | FNMESDSFEDLWKGEDFSNYSYSSDL | 35 | N-terminal biotinylation (e.g. via TTDS_Lysin |
| | | | | | PPSLPDVAP | | linker) |
| 81 | CXCR2 | MOUSE | TRD | Y24 | MGEFKVDKFNIEDFFSGDLDIFNYSSG | 37 | N-terminal biotinylation (e.g. via TTDS_Lysin |
| | | | | | MPSILPDAVP | | linker) |
| 82 | CXCR2 | HUMAN | N term | Y23, Y25 | MEDFNMESDSFEDFWKGEDLSNYSY | 48 | N-terminal biotinylation (e.g. via TTDS_Lysin |
| | | | | | SSTLPPFLLDAAPXEPESLEINK | | linker); C39S (to avoid aggregation) |
| 83 | CXCR2 | MACMU | N term | Y20, Y22 | FNMESDSFEDLWKGEDFSNYSYSSDL | 45 | N-terminal biotinylation (e.g. via TTDS_Lysin |
| | | | | | PPSLPDVAPXRPESLEINK | | linker); C36S (to avoid aggregation) |
| 84 | CXCR2 | MOUSE | N term | Y24 | MGEFKVDKFNIEDFFSGDLDIFNYSSG | 47 | N-terminal biotinylation (e.g. via TTDS_Lysin |
| | | | | | MPSILPDAVPXHSENLEINS | | linker); C38S (to avoid aggregation) |
| 85 | CXCR3 | HUMAN | TRD | Y27, Y29 | MVLEVSDHQVLNDAEVAALLENFSS | 36 | N-terminal biotinylation (e.g. via TTDS_Lysin |
| | | | | | SYDYGENESDS | | linker) |
| 86 | CXCR3 | MACFA | TRD | Y27, Y29 | MVLEVSDHQVLNDAEVAALLENFSS | 36 | N-terminal biotinylation (e.g. via TTDS_Lysin |
| | | | | | SYDYGENESDS | | linker) |
| 87 | CXCR3 | MOUSE | TRD | Y2, Y27, | MYLEVSERQVLDASDFAFLLENSTSP | 41 | N-terminal biotinylation (e.g. via TTDS_Lysin |
| | | | | Y29 | YDYGENESDFSDSPP | | linker) |
| 88 | CXCR3 | HUMAN | N term | Y27, Y29 | MVLEVSDHQVLNDAEVAALLENFSS | 42 | N-terminal biotinylation (e.g. via TTDS_Lysin |
| | | | | | SYDYGENESDSXXTSPP | | linker); C37S, C38S (to avoid aggregation) |
| 89 | CXCR3 | MACFA | N term | Y27, Y29 | MVLEVSDHQVLNDAEVAALLENFSS | 42 | N-terminal biotinylation (e.g. via TTDS_Lysin |
| | | | | | SYDYGENESDSXXTSPP | | linker); C37S, C38S (to avoid aggregation) |
| 90 | CXCR3 | MOUSE | N term | Y2, Y27, | MYLEVSERQVLDASDFAFLLENSTSP | 52 | N-terminal biotinylation (e.g. via TTDS_Lysin |
| | | | | Y29 | YDYGENESDFSDSPPXPQDFSLNFDR | | linker); C42S (to avoid aggregation) |
| 91 | CXCR4 | HUMAN | TRD | (Y7), Y12, | MEGISIYTSDNYTEEMGSGDYDSMKE | 27 | N-terminal biotinylation (e.g. via TTDS_Lysin |
| | | | | Y21 | P | | linker) |
| 92 | CXCR4 | MACFA | TRD | (Y7), Y12, | MEGISIYTSDNYTEEMGSGDYDSIKEP | 27 | N-terminal biotinylation (e.g. via TTDS_Lysin |
| | | | | Y21 | | | linker) |
| 93 | CXCR4 | MOUSE | TRD | Y9, Y14, | MEPISVSIYTSDNYSEEVGSGDYDSN | 29 | N-terminal biotinylation (e.g. via TTDS Lysin |
| | | | | Y23 | KEP | | linker) |
| 94 | CXCR4 | HUMAN | N term | (Y7), Y12, | MEGISIYTSDNYTEEMGSGDYDSMKE | 38 | N-terminal biotinylation (e.g. via TTDS_Lysin |
| | | | | Y21 | PXFREENANFNK | | linker); C28S (to avoid aggregation) |
| 95 | CXCR4 | MACFA | N term | (Y7), Y12, | MEGISIYTSDNYTEEMGSGDYDSIKEP | 38 | N-terminal biotinylation (e.g. via TTDS_Lysin |
| | | | | Y21 | XFREENAHFNR | | linker); C28S (to avoid aggregation) |
| 96 | CXCR4 | MOUSE | N term | Y9, Y14, | MEPISVSIYTSDNYSEEVGSGDYDSN | 40 | N-terminal biotinylation (e.g. via TTDS_Lysin |
| | | | | Y23 | KEPXFRDENVHFNR | | linker); C30S (to avoid aggregation) |
| 97 | CXCR5 | HUMAN | TRD | Y3, Y27 | MNYPLTLEMDLENLEDLFWELDRLD | 37 | N-terminal biotinylation (e.g. via TTDS_Lysin |
| | | | | | NYNDTSLVENHL | | linker) |
| 98 | CXCR5 | MACFA | TRD | Y3, Y27 | MNYPLMLEMDLENLEDLFLEFDKFD | 37 | N-terminal biotinylation (e.g. via TTDS_Lysin |
| | | | | | NYNDTSLVENHL | | linker) |
| 99 | CXCR5 | MOUSE | TRD | Y3, Y14, | MNYPLTLDMGSITYNMDDLYKELAF | 39 | N-terminal biotinylation (e.g. via TTDS_Lysin |
| | | | | Y20, Y26 | YSNSTEIPLQDSNF | | linker) |
| 100 | CXCR5 | HUMAN | N term | Y3, Y27 | MNYPLTLEMDLENLEDLFWELDRLD | 55 | N-terminal biotinylation (e.g. via TTDS_Lysin |
| | | | | | NYNDTSLVENHLXPATEGPLMASFK | | linker); C38S (to avoid aggregation) |
| | | | | | AVFVP | | |
| 101 | CXCR5 | MACFA | N term | Y3, Y27 | MNYPLMLEMDLENLEDLFLEFDKFD | 55 | N-terminal biotinylation (e.g. via TTDS_Lysin |
| | | | | | NYNDTSLVENHLXPATEGPLMASFK | | linker); C38S (to avoid aggregation) |
| | | | | | AVFVP | | |
| 102 | CXCR5 | MOUSE | N term | Y3, Y14, | MNYPLTLDMGSITYNMDDLYKELAF | 57 | N-terminal biotinylation (e.g. via TTDS_Lysin |
| | | | | Y20, Y26 | YSNSTEIPLQDSNFXSTVEGPLLTSFK | | linker); C40S (to avoid aggregation) |
| | | | | | AVFMP | | |
| 103 | CXCR6 | HUMAN | TRD | Y6, Y10 | MAEHDYHEDYGFSSFNDSSQEEHQD | 32 | N-terminal biotinylation (e.g. via TTDS_Lysin |
| | | | | | FLQFSKV | | linker) |
| 104 | CXCR6 | MACFA | TRD | Y4, Y7, | MAEYDHYEDDGFLNSFNDSSQEEHQ | 33 | N-terminal biotinylation (e.g. via TTDS_Lysin |
| | | | | Y39 | DFLQFRKV | | linker) |
| 105 | CXCR6 | MOUSE | TRD | Y11, (Y15) | MDDGHQESALYDGHYEGDFWLFNN | 41 | N-terminal biotinylation (e.g. via TTDS_Lysin |
| | | | | | SSDNSQENKRFLKFKEV | | linker) |
| 106 | CXCR6 | HUMAN | N term | Y6, Y10 | MAEHDYHEDYGFSSFNDSSQEEHQD | 43 | N-terminal biotinylation (e.g. via TTDS_Lysin |
| | | | | | FLQFSKVFLPXMYLVVFV | | linker); C33S (to avoid aggregation) |
| 107 | CXCR6 | MACFA | N term | Y4, Y7, | MAEYDHYEDDGFLNSFNDSSQEEHQ | 44 | N-terminal biotinylation (e.g. via TTDS_Lysin |
| | | | | Y39 | DFLQFRKVFLPXMYLVVFV | | linker); C34S (to avoid aggregation) |
| 108 | CXCR6 | MOUSE | N term | Y11, (Y15) | MDDGHQESALYDGHYEGDFWLFNN | 45 | N-terminal biotinylation (e.g. via TTDS_Lysin |
| | | | | | SSDNSQENKRFLKFKEVFLPX | | linker); C42S (to avoid aggregation) |
| 157 | CX3CR1 | HUMAN | TRD | Y14 | MDQFPESVTENFEYDDLAEA | 20 | N-terminal biotinylation (e.g. via TTDS_Lysin |
| | | | | | | | linker) |
| 158 | CX3CR1 | MACFA | TRD | Y20 | LRNVEANFLGFLLPLLIMSY | 20 | N-terminal biotinylation (e.g. via TTDS_Lysin |
| | | | | | | | linker) |
| 159 | CX3CR1 | MOUSE | TRD | Y15 | MSTSFPELDLENFEYDDSAEA | 21 | N-terminal biotinylation (e.g. via TTDS_Lysin |
| | | | | | | | linker) |
| 160 | CX3CR1 | HUMAN | N term | Y14, Y22 | MDQFPESVTENFEYDDLAEAXYIGDI | 31 | N-terminal biotinylation (e.g. via TTDS_Lysin |
| | | | | | VVFGT | | linker); C21S (to avoid aggregation) |
| 161 | CX3CR1 | MACFA | N term | Y20, Y22 | LRNVEANFLGFLLPLLIMSYXYFRIIQ | 31 | N-terminal biotinylation (e.g. via TTDS_Lysin |
| | | | | | TLFS | | linker); C21S (to avoid aggregation) |
| 162 | CX3CR1 | MOUSE | N term | Y15, Y23 | MSTSFPELDLENFEYDDSAEAXYLGD | 32 | N-terminal biotinylation (e.g. via TTDS_Lysin |
| | | | | | IVAFGT | | linker); C22S (to avoid aggregation) |
| 163 | CXCR1 | HUMAN | TRD | Y27 | MSNITDPQMWDFDDLNFTGMPPADE | 29 | N-terminal biotinylation (e.g. via TTDS_Lysin |
| | | | | | DYSP | | linker) |
| 164 | CXCR1 | MACMU | TRD | Y14, Y28 | MSNATDPQMGDDDYDLNFTGMPPT | 30 | N-terminal biotinylation (e.g. via TTDS_Lysin |
| | | | | | DEDYSP | | linker) |
| 165 | CXCR1 | MOUSE | TRD | Y6, Y32 | MAEAEYFIWTNPEGDFEKEFGNITGM | 35 | N-terminal biotinylation (e.g. via TTDS_Lysin |
| | | | | | LPTGDYFIP | | linker) |
| 166 | CXCR1 | HUMAN | N term | Y27 | MSNITDPQMWDFDDLNFTGMPPADE | 39 | N-terminal biotinylation (e.g. via TTDS_Lysin |
| | | | | | DYSPXMLETETLNK | | linker); C30S (to avoid aggregation) |
| 167 | CXCR1 | MACMU | N term | Y14, Y28, | MSNATDPQMGDDDYDLNFTGMPPT | 46 | N-terminal biotinylation (e.g. via TTDS_Lysin |
| | | | | Y41 | DEDYSPXRLETQSLNKYVVIVT | | linker); C31S (to avoid aggregation) |
| 168 | CXCR1 | MOUSE | N term | Y6, Y32 | MAEAEYFIWTNPEGDFEKEFGNITGM | 44 | N-terminal biotinylation (e.g. via TTDS_Lysin |
| | | | | | LPTGDYFIPXKRVPITNR | | linker); C36S (to avoid aggregation) |

TABLE 5.1
Polypeptides synthesized for CCR8 as target

| | Anti- | | | Sulfa- | Additional |
|---|---|---|---|---|---|
| ID | gen | Species | Domain | tion | modifications |
| TPP-13798 | CCR8 | cyno | Lid | — | C-terminal biotinylation (e.g. via TTDS linker) |
| TPP-13796 | CCR8 | human | Lid | — | C-terminal biotinylation (e.g. via TTDS linker) |
| TPP-13797 | CCR8 | mouse | Lid | — | C-terminal biotinylation (e.g. via TTDS linker) |
| TPP-13794 | CCR8 | cyno | TRD | — | N-terminal biotinylation (e.g. via TTDS_Lysin linker) |
| TPP-13795 | CCR8 | cyno | TRD | Y3, Y15, Y17 | N-terminal biotinylation (e.g. via TTDS_Lysin linker) |
| TPP-13791 | CCR8 | human | TRD | — | N-terminal biotinylation (e.g. via TTDS_Lysin linker) |
| TPP-13792 | CCR8 | mouse | TRD | — | N-terminal biotinylation (e.g. via TTDS_Lysin linker) |
| TPP-13793 | CCR8 | mouse | TRD | Y3, Y14, Y15 | N-terminal biotinylation (e.g. via TTDS_Lysin linker) |
| TPP-13965 | CCR8 | cyno | N-term | | N-terminal biotinylation (e.g. via TTDS_Lysin linker); |
| | | | | | C25S (to avoid aggregation) |
| TPP-14828 | CCR8 | cyno | N term | Y3, Y15, Y17 | N-terminal biotinylation (e.g. via TTDS_Lysin linker); |
| | | | | | C25S (to avoid aggregation) |
| TPP-13963 | CCR8 | human | N term | — | N-terminal biotinylation (e.g. via TTDS_Lysin linker); |
| | | | | | C25S (to avoid aggregation) |
| TPP-14827 | CCR8 | human | N term | Y3, Y15, Y17 | N-terminal biotinylation (e.g. via TTDS_Lysin linker); |
| | | | | | C25S (to avoid aggregation) |
| TPP-13964 | CCR8 | mouse | N term | — | N-terminal biotinylation (e.g. via TTDS_Lysin linker); |
| | | | | | C23S (to avoid aggregation) |
| TPP-14830 | CCR8 | mouse | N term | Y3, Y14, Y15 | N-terminal biotinylation (e.g. via TTDS_Lysin linker); |
| | | | | | C23S (to avoid aggregation) |

[1848] To test if posttranslational modifications of proteins were causing the difficulties for the antibody generation, peptides comprising TRD and/or N term sequences were used, which were either unmodified or sulfated. Sulfation on the cynomolgus and human TRD of CCR8 were introduced on at least 50% of the tyrosines, e.g. on the positions 3, 15 and 17 of the respective peptides. For the mouse TRD and N term peptides, sulfations were introduced on the tyrosines at position 3, 14 and 15 of the respective peptides (cf. Table 6.1). In addition, peptides comprising the LID where engineered by introduction of a C-terminal biotinylation that was attached via a TTDS (Trioxatridecan-succinamic acid) linker. Other tags and linkers can also be used. The peptides for the TRD or N term were modified by introduction of a N-terminal biotinylation attached via a TTDS-Lysin linker. Again, further known linker and/or tags can likewise be used to facilitate immobilization of the peptides.

[1849] Peptide Synthesis

[1850] Peptides can be obtained from different commercial sources and can be prepared as known in the art, for example using standard Fmoc solid-phase peptide synthesis (SPPS) chemistry. The efficient synthesis of sulfated peptides is technically challenging as tyrosine-sulfated peptides are stable under basic conditions, while the sulfotyrosines undergo desulfation under acidic conditions rendering the simple stepwise incorporation of FmocTyr(SO3Na)OH into the growing peptide unsuitable. Global sulfation of peptides is possible, for example using sulfur trioxide-pyridine, but does not allow for specific sulfation of selected tyrosines. However, Fmoc-based SSPS can nevertheless be used for synthesis of sulfated peptides. To this end orthogonally protected tyrosine derivatives like fluorosulfated tyrosine, azidomethyl protected tyrosine or neopentyl-protected tyrosine may be used for incorporation. The protected tyrosine can be subsequently unmasked in a selective and quantitative way.

[1851] Chen et al., Angew Chem, 2016, have reported a one-step synthesis of Fmoc-fluorosulfated tyrosine. An efficient Fmoc solid-phase peptide synthesis strategy is then introduced for incorporating the fluorosulfated tyrosine residue into peptides of interest. Standard simultaneous peptide-resin cleavage and removal of the acid-labile side-chain protecting groups affords the crude peptides containing fluorosulfated tyrosine. Basic ethylene glycol, serving as solvent and reactant, transforms the fluorosulfated tyrosine peptides into sulfotyrosine peptides in high yield.

[1852] The resulting peptides can be subsequently purified as known in the art, e.g. by HPLC, e.g. on a BEH C-18 (Waters) or a Kinetex C-18 (Phenomenex) column and can be analyzed by mass spectrometry (IonSpray and Positive Ion Detector), e.g. for quality control.

[1853] In literature, two disulfide bridges within the full length human CCR8 protein have been described to connect the extracellular loop 1 (ECL1) and extracellular loop 2 (ECL2) via the cysteines on positions 106 and 183. A further disulfide bridge between cysteines 25 and 272 is assumed to connect the 7^{th} transmembrane helix with the N-terminus. However, the peptides according to the example are not expected to form any disulfide bridges between cysteines.

### Example 6: Phage Display and Human Anti-CCR8 Antibody Screening

[1854] A fully human antibody phage display library (BioInvent n-CoDeR Fab lambda library) was used to isolate human monoclonal antibodies by selection against soluble biotinylated peptides. Peptides were provided by Pepscan. The synthesis of peptides was performed as described in example 5. For the panning procedure the following protocol was applied.

TABLE 6.1
List of peptides including modifications used for antibody
selection by phage display and ELISA screening.

| | Anti- | | Do- | | |
|---|---|---|---|---|---|
| ID | gen | Species | main | Sulfation | Additional modifications |
| TPP-14828 | CCR8 | cyno | Z | Y3, Y15, | N-terminal biotinylation |
| | | | term | Y17 | via TTDS_Lysin |
| | | | | | linker; C25S (to avoid |
| | | | | | aggregation) |
| TPP-14827 | CCR8 | human | N | Y3, Y15, | N-terminal biotinylation |
| | | | term | Y17 | via TTDS_Lysin |
| | | | | | linker; C25S (to avoid |
| | | | | | aggregation) |
| TPP-14829 | CCR4 | human | N | Y22 | N-terminal biotinylation |
| (off-target) | | | term | | via TTDS_Lysin |
| | | | | | linker; C29S (to avoid |
| | | | | | aggregation) |

[1855] Streptavidin-coupled Dynabeads M-280 (Invitrogen™) were coated for one hour at room temperature (RT) with the biotinylated peptide (1 tube) and the biotinylated off-target peptide (3 tubes), respectively. Dynabeads were washed and subsequently blocked for 1 h at RT with end-over-end rotation.

[1856] For depletion of off-target binders, the blocked phage library was added to the blocked off-target loaded Dynabeads and incubated for 10 min at room temperature with end-over-end rotation. This depletion step was repeated 2 times. The depleted phage library was added to the blocked target loaded Dynabeads and incubated for 60 min at RT with end-over-end rotation.

[1857] After stringent washing (3× in blocking buffer (PBS-T, 3% milk powder) and 9× in PBS-T (150 mM NaCl; 8 mM Na2HPO4; 1.5 mM KH2PO4; adjusted to pH=7.4-7.6, 0.05% Tween-20)), Dynabeads with Fab-phages binding specifically to the coated target were directly used to infect E. coli strain HB101. Subsequently the phages were amplified in E. coli strain HB101 using M13K07 Helper Phage (Invitrogen).

[1858] In the following selection rounds the target concentration was decreased to augment the selection pressure for high affinity binders. During panning of the library, two different selection strategies were carried out (FIG. 4). The strategies were designed to identify antibodies exhibiting binding activity towards the human CCR8 N-terminal region comprising the TRD and/or the cynomolgus CCR8 N-terminal region comprising the TRD. All peptides used as antigens or for off target panning were sulfated in at least one position, cf. Table 4.1. and Table 6.1.

[1859] For both strategies, a depletion step was included using biotinylated human CCR4 N-terminal region comprising the TRD (TPP-14829, SEQ ID NO:22, with Y22 being sulfated) as off-target peptide. Strategy I comprised a first panning round on the human CCR8 N-terminal, sulfated peptide (TPP-14827, SEQ ID NO:46, with Y3, Y15, Y17 being sulfated) followed by either 3 rounds on the same peptide (TPP-14827, SEQ ID NO:46 with Y3, Y15, Y17 being sulfated) or on the cynomolgus CCR8 N-terminal, sulfated peptide (TPP-14828, SEQ ID NO:47 with Y3, Y15, Y17 being sulfated).

[1860] Strategy II comprised a first panning round on the cynomolgus CCR8 N-terminal, sulfated peptide (TPP-14828, SEQ ID NO:47 with Y3, Y15, Y17 being sulfated) followed by either 3 rounds on the same peptide (TPP-14828, SEQ ID NO:47 with Y3, Y15, Y17 being sulfated) or three rounds on the human CCR8 N-terminal, sulfated peptide (TPP-14827, SEQ ID NO:46 with Y3, Y15, Y17 being sulfated), as depicted in FIG. 4.

[1861] For a first qualitative assessment, for each clone pool monoclonal cultivation and expression of 88 randomly picked Fab-on-phage clones was performed and clones were subsequently tested for binding to the respective target previously used for panning. In addition, binding to human and cynomolgus CCR8 expressing cells was determined by flow cytometry (FACS).

[1862] A specific binder is defined in the particular context as a molecule showing
[1863] (i) in the ELISA assay a signal intensity for the target which is at least 10 times higher than the signal intensity for the off-target,
[1864] (ii) in FACS assay a signal for the CCR8 expressing cell lines which is at least 2 times higher than the signal for a control cell line not expressing CCR8, and
[1865] (iii) in FACS assay a signal on the control cell line which is smaller than 10000.

[1866] Plasmid-DNA from 12 pools with significant hit rates in at least one of the two assays was submitted to gene III removal and the resulting soluble Fabs were screened in a high throughput ELISA and FACS screening.

### Example 7: High Throughput Screening for Human Anti-Human CCR8 Antibodies

[1867] From the 12 clone pools generated during phage display, 17000 different sFab clones were screened in a high throughput screening by ELISA (HTS-ELISA) to determine their binding to the peptides that were previously used for phage display panning, namely (i) TPP-14827, SEQ ID NO:46, with Y3, Y15, Y17 being sulfated, (ii) TPP-14828, SEQ ID NO:47 with Y3, Y15, Y17 being sulfated and (iii) the respective off-target peptide TPP-14829, SEQ ID NO:22, with Y22 being sulfated. For ELISA screening, the peptides were immobilized on streptavidin coated plates (Greiner bio-one 781997) with a concentration of 0.1 μg/ml at 4° C. in coating buffer (Carbonat-Basis, Candor 121125). After washing the plates 3 times with, 60 μl PBS 0.05% Tween and blocking with, 50 μl Smart Block® (Candor 113500) for 1 h at 20° C., 10 sFab samples were added to the plates and incubated at 20° C. for 1 h. After subsequent washing with, 60 μl PBS 0.05% Tween for 3 times, 20 μl of an anti-c-Myc HRP antibody were added and incubated for 1 h at 20° C. followed by subsequent washing 3 times with, 60 μl PBS 0.05% Tween and addition of 20 Amplex Red solution (Invitrogen A12222, 1:1000 in NaP-buffer 50 mM pH7.6 with, 1:10000 of 30% H2O2). After final incubation for 20 min at 20° C. the signal was determined using an emission wavelength of 595 nm and an excitation wavelength of 530 nm. For analysis, the signal to background ratio of the single sFab clones was used whereas the background is defined by the average value of 48 wells on each plate, not containing any sFab culture but the respective sample medium.

[1868] In total 2193 different sFab clones showed significant binding to both human and cynomolgus N-terminal, sulfated peptides TPP-14827 (SEQ ID NO:46, with Y3, Y15, Y17 being sulfated) and TPP-14828 (SEQ ID NO:47 with Y3, Y15, Y17 being sulfated) as indicated by a signal to background ratio bigger than 5 while not demonstrating any significant binding to the off target TPP-14829 (SEQ ID NO:22 with Y22 being sulfated). These sFab clones were reformatted into full length human IgG1 antibodies and applied to FACS screening on human and cynomolgus CCR8 expressing cell lines.

[1869] Based on binding to both, cynomolgus as well as human CCR8 expressing cells as well as not demonstrating any significant unspecific binding to a parental cell line not expressing CCR8, ten antibody clones were selected for production and further characterization. These initial hits were TPP-17575 to TPP-17581 and TPP-18205 to TPP-18207, the CDRs are shown in Table 7.1. Antibodies were further manually optimized for applicability in therapy to yield the set of antibodies shown in Table 7.2 a and Table 7.2 b, cf. also sequence listing.

[1870] Furthermore, in order to obtain antibody TPP-27495, the sequences of TPP-23411 were engineered to comprise YTE mutations M252Y, S254T and T256E. TPP-27495 is 70% afucosylated.

[1871] Furthermore, in order to obtain antibody TPP-27496, the sequences of TPP-23411 were engineered to comprise LS mutations M428L and N434S. TPP-27496 is 70% afucosylated.

### Example 8: Generation of Anti-Murine CCR8 Antibodies

[1872] Phage Display and Antibody Screening

[1873] A fully human antibody phage display library (BioInvent n-CoDeR Fab lambda library) was used to isolate human monoclonal antibodies recognizing murine CCR8 by selection against soluble biotinylated peptides. Peptides were provided by Pepscan. The synthesis of peptides was performed as described elsewhere herein. For the panning procedure the following protocol was applied.

[1874] Streptavidin-coupled Dynabeads M-280 (Invitrogen™) were coated for one hour at room temperature (RT) with the biotinylated peptide (1 tube) and the biotinylated off-target peptide (3 tubes), respectively. Dynabeads were washed and subsequently blocked for 1 h at RT with end-over-end rotation. For depletion of off-target binders, the blocked phage library was added to the blocked off-target loaded Dynabeads and incubated for 10 min at room temperature with end-over-end rotation. This depletion step was repeated 2 times. The depleted phage library was added to the blocked target loaded Dynabeads and incubated for 60 min at RT with end-over-end rotation.

[1875] After stringent washing (3× in blocking buffer (PBS-T, 3% milk powder) and 9× in PBS (150 mM NaCl; 8 mM Na2HPO4; 1.5 mM KH2PO4; adjusted to pH=7.4-7.6) with, 0.05% Tween-20)), Dynabeads with Fab-phages binding specifically to the coated target were directly used to infect E. coli strain HB101. Subsequently the phages were amplified in E. coli strain HB101 using M13K07 Helper Phage (Invitrogen™).

[1876] In the following selection rounds the target concentration was decreased to augment the selection pressure for high affinity binders.

TABLE 7.1
CDRs for specific human anti-human CCR8 candidate antibodies obtained with the method according
to the current invention.

| Identifier | LCDR1 | LCDR2 | LCDR3 | HCDR1 | HCDR2 | HCDR3 |
|---|---|---|---|---|---|---|
| TPP-17575 | SGSSSNIGNNYVS | GNSNRPS | QTWGTGIRV | SYAMH | LISWDGGSTYYADSVKG | GGIGRRPGLEY |
| TPP-17576 | SGSSSNIGNNAVN | RNNQRSS | QSYDNSLSASV | SYAMS | RIRSKANSYATAYAASVKG | PLDS |
| TPP-17577 | SGSSSNIGSNTVN | RNNQRPS | AAWDDSLKALV | NAWMS | VISYDGRNKYSADSVKG | GLPYGY |
| TPP-17578 | SGSSSNIGSHTVN | RNNQRPS | AAWDDSLNGWV | NAWMS | GINWNGGSTGYADSVKG | TYSGHYGPYFDN |
| TPP-17579 | SGSWSNIGNDNVY | RNNQRPS | QSYDRSLSGSV | TYWMT | GVSWNGSRTHYVDSVKR | YSGYPDYYGMDV |
| TPP-17580 | SGSSSNIGSYPVN | RNNQRPS | SSYSVTDNLI | SYGMH | GVSWNGSRTRYADSVKG | GSYNSGWYAVS |
| TPP-17581 | TGSSSNIGAGYDVH | SHNQRPS | SAWDSSLSAWV | NYRMT | GINWNGGSTGYADSVKG | GRFDTRGFYGFDY |
| TPP-18205 | SGGNSNIGTYFVS | TNNQRPS | ETWDSNTRV | SYAMS | GIRWNSGSKGYAGSVKG | SGNYYVGYHGMDV |
| TPP-18206 | TGSSSNIGAGYNVH | TNNRRPS | AAWDASLSGWV | HYGMH | GINWNGGSTGYADSVKG | GHHSGYDGRFFDY |
| TPP-18207 | TGSSSNIGAGYDVH | KNNQRPS | AAWDDSLRGWV | NAWMS | GINWNGGSTGYADSVKG | TYTGNYGPYFDY |

TABLE 7.2 a
CDRs for specific human anti-human CCR8 candidate antibodies according to the current
invention having superior therapeutic profile.

| Identifier | LCDR1 | LCDR2 | LCDR3 | HCDR1 | HCDR2 | HCDR3 |
|---|---|---|---|---|---|---|
| TPP-16966 | SGSSSNIGSHIVN | GNTNRPS | SSYTSISTLV | SYSMN | GVSWAGSRTHYADSVKG | AAAGTRGFDY |
| TPP-17546 | SGSSSNIGSHTVN | RNNQRPS | AAWDDSLNGWV | SAWMS | GISWSGGSTGYADSVKG | TYSGHYGPYFDY |
| TPP-17578 | SGSSSNIGSHTVN | RNNQRPS | AAWDDSLNGWV | NAWMS | GINWNGGSTGYADSVKG | TYSGHYGPYFDN |
| TPP-18205 | SGGNSNIGTYFVS | TNNQRPS | ETWDSNTRV | SYAMS | GIRWNSGSKGYAGSVKG | SGNYYVGYHGMDV |
| TPP-18206 | TGSSSNIGAGYNVH | TNNRRPS | AAWDASLSGWV | HYGMH | GINWNGGSTGYADSVKG | GHHSGYDGRFFDY |
| TPP-19546 | SGSSSNIGSHTVN | RNNQRPS | AAWDDSLNGWV | SAWMS | GISWSGGSTGYADSVKG | TYSGHYGPYFDY |
| TPP-20950 | TGSSSNIGAGYNVH | TNNRRPS | AAWDASLSGWV | SYGMH | AIKWGGGSHGYADSVKG | GHHSGKDGRFFDY |
| TPP-20955 | TGSSSNIGAGYNVH | TNNRRPS | AAWDASLSGWV | SYGMH | AIKWGGGSHGYADSVKG | GHHKGYDGRFFDY |
| TPP-20965 | TGSSSNIGAGYNVH | TNNRRPS | AAWDASLSGWV | SYGMH | AIKWGGGSTGYADSVKG | GHHSGKDGRFFDY |
| TPP-21045 | SGSSSNIGSHTVN | RNNQRPS | AAWDDSLNGWV | SAWMS | GISWSGGSTGYALSVKG | TYSGHYGPFFDY |
| TPP-21047 | SGSSSNIGSHTVN | RNNQRPS | AAWDDSLNGWV | SAWMS | GISWSGGRTGYALSVKG | TYSGHYGPYFDY |
| TPP-21181 | SGGNSNIGTYFVS | TNNQRPS | ETWDSNTRV | SYAMS | GIRWNNGSKGYAGSVKG | SGNYYYGYHGMDV |
| TPP-21183 | SGGNSNIGTYFVS | TNNQRPS | ETWDSNTRV | SYAMS | GIRWNNGSKGYAGSVKG | SGNEYYGYHGMDV |
| TPP-23411 | TGSSSNIGAGYNVH | TNNRRPS | AAWDASLSGWV | SYGMH | AINWNGGSTGYADSVKG | GHHSGYDGRFFDY |

TABLE 7.2 b
CDRs for anti-human CCR8 candidate antibodies derived from TPP-23411.

| Identifier | Mutation | LCDR1 | LCDR2 | LCDR3 | HCDR1 | HCDR2 | HCDR3 |
|---|---|---|---|---|---|---|---|
| TPP-29596 | VL: A10V, | TGSSSNIGAGYNVH | TNNRRPS | AAWDASLSGWV | SYGMH | GINWNGGSTGYADSVKG | GHHSGYDGRFFDY |
| | T13A; | | | | | | |
| | VH: H31S; | | | | | | |
| | C-terminal | | | | | | |
| | K | | | | | | |
| TPP-29597 | VL: T13; | TGSSSNIGAGYNVH | TNNRRPS | AAWDASLSGWV | SYGMH | AINWNGGSTGYADSVKG | GHHSGYDGRFFDY |
| | VH: H31S, | | | | | | |
| | G50A; | | | | | | |
| | C-terminal | | | | | | |
| | K | | | | | | |
| TPP-18429 | VL: A10V | TGSSSNIGAGYNVH | TNNRRPS | AAWDASLSGWV | HYGMH | GINWNGGSTGYADSVKG | GHHSGYDGRFFDY |
| TPP-18430 | VL: T13A | TGSSSNIGAGYNVH | TNNRRPS | AAWDASLSGWV | HYGMH | GINWNGGSTGYADSVKG | GHHSGYDGRFFDY |
| TPP-18432 | VL: A10V, | TGSSSNIGAGYNVH | TNNRRPS | AAWDASLSGWV | HYGMH | GINWNGGSTGYADSVKG | GHHSGYDGRFFDY |
| | T13A | | | | | | |
| TPP-18433 | VH: H31S | TGSSSNIGAGYNVH | TNNRRPS | AAWDASLSGWV | SYGMH | GINWNGGSTGYADSVKG | GHHSGYDGRFFDY |
| TPP-18436 | VH: G50A | TGSSSNIGAGYNVH | TNNRRPS | AAWDASLSGWV | HYGMH | AINWNGGSTGYADSVKG | GHHSGYDGRFFDY |
| TPP-19571 | VH: H31S, | TGSSSNIGAGYNVH | TNNRRPS | AAWDASLSGWV | SYGMH | AINWNGGSTGYADSVKG | GHHSGYDGRFFDY |
| | G50A | | | | | | |
| TPP-27477 | VL: A10V; | TGSSSNIGAGYNVH | TNNRRPS | AAWDASLSGWV | SYGMH | AINWNGGSTGYADSVKG | GHHSGYDGRFFDY |
| | VH: H31S, | | | | | | |
| | G50A | | | | | | |
| TPP-27478 | VL: T13A; | TGSSSNIGAGYNVH | TNNRRPS | AAWDASLSGWV | SYGMH | AINWNGGSTGYADSVKG | GHHSGYDGRFFDY |
| | VH: H31S, | | | | | | |
| | G50A | | | | | | |
| TPP-27479 | VL: A10V, | TGSSSNIGAGYNVH | TNNRRPS | AAWDASLSGWV | SYGMH | GINWNGGSTGYADSVKG | GHHSGYDGRFFDY |
| | T13A; | | | | | | |
| | VH: H31S | | | | | | |
| TPP-27480 | VL: A10V, | TGSSSNIGAGYNVH | TNNRRPS | AAWDASLSGWV | HYGMH | AINWNGGSTGYADSVKG | GHHSGYDGRFFDY |
| | T13A; | | | | | | |
| | VH: G50A | | | | | | |
| TPP-29367 | C-terminal | TGSSSNIGAGYNVH | TNNRRPS | AAWDASLSGWV | HYGMH | GINWNGGSTGYADSVKG | GHHSGYDGRFFDY |
| | K | | | | | | |
| TPP-29368 | VL: A10V, | TGSSSNIGAGYNVH | TNNRRPS | AAWDASLSGWV | HYGMH | GINWNGGSTGYADSVKG | GHHSGYDGRFFDY |
| | T13A; | | | | | | |
| | C-terminal | | | | | | |
| | K | | | | | | |
| TPP-29369 | VH: H31S, | TGSSSNIGAGYNVH | TNNRRPS | AAWDASLSGWV | SYGMH | AINWNGGSTGYADSVKG | GHHSGYDGRFFDY |

G50A;
C-terminal
K

TABLE 7.3
CDRs for specific anti-murine CCR8 candidate antibodies derived with a mixed approach.

| Identifier | LCDR1 | LCDR2 | LCDR3 | HCDR1 | HCDR2 | HCDR3 |
|---|---|---|---|---|---|---|
| TPP-14099 | SGSSFNIGSHFVY | KNNQRPS | AAWDDSLNGPV | DYGVH | GVSWNGSRTHYADSVKG | RGA |
| TPP-14095 | SGSSSNIGSNYVY | GNNNRPS | AAWDDSLNGWV | SYGMH | AISGSGGSTYYADSVKG | GROLGS |
| TPP-15285 | SGSSFNIGSHFVY | KNNQRPS | AAWDDSLNGPV | DYGVH | GVSWNGSRTHYADSVKG | RGA |
| TPP-15286 | SGSSSNIGSNYVY | GNNNRPS | AAWDDSLNGWV | SYGMH | AISGSGGSTYYADSVKG | GRQLGS |

TABLE 8.1
List of peptides used for antibody selection by phage display and ELISA screening

| ID | Antigen | Species | Domain | Sulfation | Additional modifications |
|---|---|---|---|---|---|
| TPP-13792 | CCR8 | mouse | TRD | no | N-terminal biotinylation via TTDS_Lysin linker |
| TPP-13793 | CCR8 | mouse | TRD | Y3, Y14, Y15 | N-terminal biotinylation via TTDS_Lysin linker |
| TPP-13799 (off-target) | CCR4 | human | TRD | no | N-terminal biotinylation via TTDS_Lysin linker |
| TPP-13800 | CCR4 | human | TRD | Y19, Y22 | N-terminal biotinylation via TTDS_Lysin linker |

TABLE 9.1
Structural analysis of HCDR3 for specific human anti-human CCR8 candidate antibodies obtained a method according to the current invention.

| | | | | | | | | % | % | % | % | % | % | % | % | % | % | |
|---|---|---|---|---|---|---|---|---|---|---|---|---|---|---|---|---|---|---|
| Identifier | HCDR3 | H | K | R | Y | D | E | H | K | R | Y | D | E | (H + Y) | Positive | Negative | Charged | Length |
| TPP-17575 | GGIGRRPGLEY | 0.0 | 0.0 | 2.0 | 1.0 | 0.0 | 1.0 | 0.0 | 0.0 | 18.2 | 9.1 | 0.0 | 9.1 | 9.1 | 18.2 | 9.1 | 27.3 | 11.0 |
| | (SEQ ID NO: | | | | | | | | | | | | | | | | | |
| | 278) | | | | | | | | | | | | | | | | | |
| TPP-17576 | PLDS | 0.0 | 0.0 | 0.0 | 0.0 | 1.0 | 0.0 | 0.0 | 0.0 | 0.0 | 0.0 | 25.0 | 0.0 | 0.0 | 0.0 | 25.0 | 25.0 | 4.0 |
| | (SEQ ID NO: | | | | | | | | | | | | | | | | | |
| | 296) | | | | | | | | | | | | | | | | | |
| TPP-17577 | GLPYGY | 0.0 | 0.0 | 0.0 | 2.0 | 0.0 | 0.0 | 0.0 | 0.0 | 0.0 | 33.3 | 0.0 | 0.0 | 33.3 | 0.0 | 0.0 | 0.0 | 6.0 |
| | (SEQ ID NO: | | | | | | | | | | | | | | | | | |
| | 314) | | | | | | | | | | | | | | | | | |
| TPP-17578 | TYSGHYGPYFDN | 1.0 | 0.0 | 0.0 | 3.0 | 1.0 | 0.0 | 8.3 | 0.0 | 0.0 | 25.0 | 8.3 | 0.0 | 33.3 | 8.3 | 8.3 | 16.7 | 12.0 |
| | (SEQ ID NO: | | | | | | | | | | | | | | | | | |
| | 332) | | | | | | | | | | | | | | | | | |
| TPP-17579 | YSGYPDYYGMDV | 0.0 | 0.0 | 0.0 | 4.0 | 2.0 | 0.0 | 0.0 | 0.0 | 0.0 | 33.3 | 16.7 | 0.0 | 33.3 | 0.0 | 16.7 | 16.7 | 12.0 |
| | (SEQ ID NO: | | | | | | | | | | | | | | | | | |
| | 350) | | | | | | | | | | | | | | | | | |
| TPP-17580 | GSYNSGWYAVS | 0.0 | 0.0 | 0.0 | 2.0 | 0.0 | 0.0 | 0.0 | 0.0 | 0.0 | 18.2 | 0.0 | 0.0 | 18.2 | 0.0 | 0.0 | 0.0 | 11.0 |
| | (SEQ ID NO: | | | | | | | | | | | | | | | | | |
| | 368) | | | | | | | | | | | | | | | | | |
| TPP-17581 | GRFDTRGFYGFDY | 0.0 | 0.0 | 2.0 | 2.0 | 2.0 | 0.0 | 0.0 | 0.0 | 15.4 | 15.4 | 15.4 | 0.0 | 15.4 | 15.4 | 15.4 | 30.8 | 13.0 |
| | (SEQ ID NO: | | | | | | | | | | | | | | | | | |
| | 386) | | | | | | | | | | | | | | | | | |
| TPP-18205 | SGNYYVGYHGMDV | 1.0 | 0.0 | 0.0 | 3.0 | 1.0 | 0.0 | 7.7 | 0.0 | 0.0 | 23.1 | 7.7 | 0.0 | 30.8 | 7.7 | 7.7 | 15.4 | 13.0 |
| | (SEQ ID NO: | | | | | | | | | | | | | | | | | |
| | 404) | | | | | | | | | | | | | | | | | |
| TPP-18206 | GHHSGYDGRFFDY | 2.0 | 0.0 | 1.0 | 2.0 | 2.0 | 0.0 | 15.4 | 0.0 | 7.7 | 15.4 | 15.4 | 0.0 | 30.8 | 23.1 | 15.4 | 38.5 | 13.0 |
| | (SEQ ID NO: | | | | | | | | | | | | | | | | | |
| | 422) | | | | | | | | | | | | | | | | | |
| TPP-18207 | TYTGNYGPYFDY | 0.0 | 0.0 | 0.0 | 4.0 | 1.0 | 0.0 | 0.0 | 0.0 | 0.0 | 33.3 | 8.3 | 0.0 | 33.3 | 0.0 | 8.3 | 8.3 | 12.0 |
| | (SEQ ID NO: | | | | | | | | | | | | | | | | | |
| | 440) | | | | | | | | | | | | | | | | | |
| Average | | 0.4 | 0.0 | 0.5 | 2.3 | 1.0 | 0.1 | 3.1 | 0.0 | 4.1 | 20.6 | 9.7 | 0.9 | 23.8 | 7.3 | 10.6 | 17.9 | 10.7 |

TABLE 9.2
Structural analysis of HCDR3 for specific human anti-human CCR8 candidate antibodies with superior therapeutic profile. e.g.
low internalization.

| | | | | | | | | % | % | % | % | % | % | % | % | % | % | |
|---|---|---|---|---|---|---|---|---|---|---|---|---|---|---|---|---|---|---|
| Identifier | HCDR3 | H | K | R | Y | D | E | H | K | R | Y | D | E | (H + Y) | Positive | Negative | Charged | Length |
| TPP-16966 | AAAGTRGFDY | 0.0 | 0.0 | 1.0 | 1.0 | 1.0 | 0.0 | 0.0 | 0.0 | 10.0 | 10.0 | 10.0 | 0.0 | 10.0 | 10.0 | 10.0 | 20.0 | 10.0 |
| | (SEQ ID NO: 260) | | | | | | | | | | | | | | | | | |
| TPP-17546 | TYSGHYGPYFDY | 1.0 | 0.0 | 0.0 | 4.0 | 1.0 | 0.0 | 8.3 | 0.0 | 0.0 | 33.3 | 8.3 | 0.0 | 41.7 | 8.3 | 8.3 | 16.7 | 12.0 |
| | (SEQ ID NO: 458) | | | | | | | | | | | | | | | | | |
| TPP-17578 | TYSGHYGPYFDN | 1.0 | 0.0 | 0.0 | 3.0 | 1.0 | 0.0 | 8.3 | 0.0 | 0.0 | 25.0 | 8.3 | 0.0 | 33.3 | 8.3 | 8.3 | 16.7 | 12.0 |
| | (SEQ ID NO: 332) | | | | | | | | | | | | | | | | | |
| TPP-18205 | SGNYYVGYHGMDV | 1.0 | 0.0 | 0.0 | 3.0 | 1.0 | 0.0 | 7.7 | 0.0 | 0.0 | 23.1 | 7.7 | 0.0 | 30.8 | 7.7 | 7.7 | 15.4 | 13.0 |
| | (SEQ ID NO: 404) | | | | | | | | | | | | | | | | | |
| TPP-18206 | GHHSGYDGRFFDY | 2.0 | 0.0 | 1.0 | 2.0 | 2.0 | 0.0 | 15.4 | 0.0 | 7.7 | 15.4 | 15.4 | 0.0 | 30.8 | 23.1 | 15.4 | 38.5 | 13.0 |
| | (SEQ ID NO: 422) | | | | | | | | | | | | | | | | | |
| TPP-19546 | TYSGHYGPYFDY | 1.0 | 0.0 | 0.0 | 4.0 | 1.0 | 0.0 | 8.3 | 0.0 | 0.0 | 33.3 | 8.3 | 0.0 | 41.7 | 8.3 | 8.3 | 16.7 | 12.0 |
| | (SEQ ID NO: 458) | | | | | | | | | | | | | | | | | |
| TPP-20950 | GHHSGKDGRFFDY | 2.0 | 1.0 | 1.0 | 1.0 | 2.0 | 0.0 | 15.4 | 7.7 | 7.7 | 7.7 | 15.4 | 0.0 | 23.1 | 30.8 | 15.4 | 46.2 | 13.0 |
| | (SEQ ID NO: 476 | | | | | | | | | | | | | | | | | |
| TPP-20955 | GHHKGYDGRFFDY | 2.0 | 1.0 | 1.0 | 2.0 | 2.0 | 0.0 | 15.4 | 7.7 | 7.7 | 15.4 | 15.4 | 0.0 | 30.8 | 30.8 | 15.4 | 46.2 | 13.0 |
| | (SEQ ID NO: 494) | | | | | | | | | | | | | | | | | |
| TPP-20965 | GHHSGKDGRFFDY | 2.0 | 1.0 | 1.0 | 1.0 | 2.0 | 0.0 | 15.4 | 7.7 | 7.7 | 7.7 | 15.4 | 0.0 | 23.1 | 30.8 | 15.4 | 46.2 | 13.0 |
| | (SEQ ID NO: 512) | | | | | | | | | | | | | | | | | |
| TPP-21045 | TYSGHYGPFFDY | 1.0 | 0.0 | 0.0 | 3.0 | 1.0 | 0.0 | 8.3 | 0.0 | 0.0 | 25.0 | 8.3 | 0.0 | 33.3 | 8.3 | 8.3 | 16.7 | 12.0 |
| | (SEQ ID NO: 530) | | | | | | | | | | | | | | | | | |
| TPP-21047 | TYSGHYGPYFDY | 1.0 | 0.0 | 0.0 | 4.0 | 1.0 | 0.0 | 8.3 | 0.0 | 0.0 | 33.3 | 8.3 | 0.0 | 41.7 | 8.3 | 8.3 | 16.7 | 12.0 |
| | (SEQ ID NO: 548) | | | | | | | | | | | | | | | | | |
| TPP-21181 | SGNYYYGYHGMDV | 1.0 | 0.0 | 0.0 | 4.0 | 1.0 | 0.0 | 7.7 | 0.0 | 0.0 | 30.8 | 7.7 | 0.0 | 38.5 | 7.7 | 7.7 | 15.4 | 13.0 |
| | (SEQ ID NO: 566) | | | | | | | | | | | | | | | | | |
| TPP-21183 | SGNEYYGYHGMDV | 1.0 | 0.0 | 0.0 | 3.0 | 1.0 | 1.0 | 7.7 | 0.0 | 0.0 | 23.1 | 7.7 | 7.7 | 30.8 | 7.7 | 15.4 | 23.1 | 13.0 |
| | (SEQ ID NO: 584) | | | | | | | | | | | | | | | | | |
| TPP-23411 | GHHSGYDGRFFDY | 2.0 | 0.0 | 1.0 | 2.0 | 2.0 | 0.0 | 15.4 | 0.0 | 7.7 | 15.4 | 15.4 | 0.0 | 30.8 | 23.1 | 15.4 | 38.5 | 13.0 |
| | (SEQ ID NO: 620) | | | | | | | | | | | | | | | | | |
| Average | | 1.3 | 0.2 | 0.4 | 2.6 | 1.4 | 0.1 | 10.1 | 1.6 | 3.5 | 21.3 | 10.8 | 0.5 | 31.4 | 15.2 | 11.4 | 26.6 | 12.4 |

[1877] For the generation of antibodies binding mouse CCR8, a selection strategy was designed to identify antibodies exhibiting binding activity towards the mouse CCR8 tyrosine rich domain (TRD) within the N-terminal region. For positive selection on the mouse CCR8 TRD peptides, a mixture containing 50% normal peptide and 50% sulfated peptide was used (Seq ID NO:45 non-sulfated (TPP-13792) or with Y3, Y14, Y15 being sulfated (TPP-13793)). A depletion step was included using a biotinylated off-target peptide being the human CCR4 TRD within the N-terminal region. Also, the depletion step on human CCR4 was conducted on a mixture of sulfated and non-sulfated peptide (Seq ID No:19 non-sulfated (TPP-13799) or with Y19 and Y22 being sulfated (TPP-13800)).

[1878] The panning strategy was to conduct four panning rounds in total, each on the specified mixture of sulfated and non-sulfated peptides, see FIG. 5.

[1879] For each clone pool monoclonal cultivation and expression of 88 randomly picked Fab-phage clones was performed and clones were subsequently tested for binding to the respective target used before for panning. However, separate ELISA measurements were conducted for the sulfated and the non-sulfated peptides.

[1880] In addition, binding to cells expressing human, mouse and cynomolgus CCR8 was determined by flow cytometry (FACS).

[1881] A specific binder is defined in the particular context as a molecule showing
[1882] (i) in the ELISA assay a signal intensity for the target which is at least 10 times higher than signal intensity for the off-target, and
[1883] (ii) in FACS assay a signal for the CCR8 expressing cell lines which is at least 10 times higher than the signal for a control cell line not expressing CCR8.

[1884] Within these measurements, the antibodies TPP-14095 and TPP-14099 were identified demonstrating binding to mouse CCR8 expressing cells but no binding to control cells, control cells expressing human CCR8, or control cells expressing cynomolgus CCR8. Further, the antibodies were found to bind to the sulfated TRD peptide but not to the non-sulfated peptide.

### Example 9: Structural Characterization of the CCR8 Antibodies

[1885] Out of the six CDR loops, the H3 loop shows the greatest structural diversity and is located in the center of the binding site. It also gains the most mutations through affinity maturation and has on average the largest number of contacts with the antigen. It therefore plays a crucial role in antigen binding.

[1886] Upon analysis of the specific structure of the antibodies obtained in the previous examples, it was surprisingly found that the composition of the HCDR3 was structurally different from usual human HCDR3 domains. In more detail, the HCDR3 domain of the human anti-human CCR8 antibodies had a substantially higher number of tyrosine residues (˜20% for the initial set of specific human CCR8 binders, ˜21% for the optimized candidates) than would be expected for a random fully human HCDR3 with matched length (˜10%, cf. Zemlin, Michael, et al. “Expressed murine and human HCDR3 intervals of equal length exhibit distinct repertoires that differ in their amino acid composition and predicted range of structures.” Journal of molecular biology 334.4 (2003): 733-749).

[1887] These data suggest a beneficial impact of tyrosine presence for specific binding to the sulfated antigen. The optimized antibodies were furthermore characterized by a substantial increase in histidine frequency. For these antibodies, the histidine content was on average 10%. The average occurrence of histidine in HCDR3 of a matched length is approximately 2% in murine HCDR3 and even lower in human HCDR3, cf. Zemlin, Michael, et al. (2003).

[1888] Because the antigens used for selection are characterized by negative charges provided in the form of sulfated tyrosines and negatively charged amino acids, the inventors hypothesized that the occurrence of positive charges in HCDR3 improves the binding to the sulfated antigen but is less essential for binding to the non-sulfated antigen. While the frequency of positively charged residues (H, K, R) in the HCDR3s of the initially obtained set of antibodies was approximately 7%, the improved antibodies had on average 15% of positive amino acids per HCDR3 (e.g. up to ˜31%).

[1889] The antibodies according to the current invention are characterized by a tyrosine frequency which is higher than for usual fully human HCDR3s. While these high tyrosine frequencies are more easily obtained with murine CDRs this may explain why previous attempts to obtain human anti-human antibodies specifically recognizing CC chemokine receptors such as CCR8 have not been successful.

### Example 10: Functional Characterization of the Anti-CCR8 Antibodies

[1890] Cell Lines

[1891] Stable HEK 293 and CHO cell lines expressing human, cynomolgus or murine CCR8 were generated using Inscreenex, as known in the art. Thymoma cell lines Hut-78 and lymphoma cell line TALL-1 were obtained from ATCC and were confirmed to show endogenous CCR8 expression. Because CCR8 expression may vary, expression levels were monitored.

[1892] Human T Regulatory Cells

[1893] FACS sorted CD4+ and CD25+ cells from PBMCs of healthy donors were purchased from either BioIVT, AllCells, or StemCell Technologies. After thawing the cells and recovery in culture overnight, the cells were activated with anti-CD3 and anti-CD28 beads designed for Treg expansion from Miltenyi and supplemented with IL-2 (R&D Systems) as directed by the Treg expansion kit protocol. Typically, after activation of naïve PBMCs, CCR8 expression was the highest between day 5-7, and cells can be restimulated 7-9 days after primary activation. Upon restimulation, CCR8 expression was the highest between day 2-4.

### Example 10.1.1: Evaluation of Affinities for Binding CCR8 from Different Species

[1894] FACS Experiments

[1895] The affinity of the antibodies for human, cynomolgus and murine CCR8 and further chemokine receptors was determined by FACS as known in the art. In brief, CHO cells were engineered to express the CCR8 from the respective species. In the alternative, activated human Tregs from a human donor were used to determine the affinity of the antibodies for activated Tregs. EC50 values were determined by FACS. All candidate antibodies had not only a superior affinity for human CCR8 with an EC50 in the low digit nanomolar range, but also a superior affinity for cynomolgus CCR8 in the same order of magnitude.

[1896] Similar affinities in these species are important to facilitate studies for prediction of later safety issues in humans. This is a major issue in the search for therapeutic antibodies in immune oncology, because mouse models have major limitations in the prediction of immunological side effects in humans. The EC50 determined for binding human Tregs were between 10 and 25 nM for the inventive antibodies shown in Table 10.1.1.1

[1897] Affinities of inventive antibodies in CHO cells expressing human CCR8, CHO cells expressing cynomolgus CCR8, or activated human Tregs (donor 1) are shown in FIGS. 6, 7 and 8, respectively.

TABLE 10.1.1.1
EC50 values of inventive antibodies in nM. FACS
staining was performed on CHO cells
stably expressing either human CCR8 or cynomolgus
CCR8, or on human activated CD4+CD25+ T cells.
These cells were activated with the Treg expansion kit from Miltenyi.

| | TPP- 17578 | TPP- 19546 | TPP- 18206 | TPP- 21360 |
|---|---|---|---|---|
| CHO with hCCR8: EC50 in nM | 1.66 | 0.78 | 0.64 | 0.40 |
| CHO with cynoCCR8: EC50 in nM | 1.04 | 0.52 | 0.67 | 0.34 |
| human Treg: EC50 in nM | 25.12 | 15.25 | 23.1 | 10.35 |

[1898] Antibodies TPP-23411 and TPP-21360 deviate from each other by one lysine residue added at the C-term of the heavy chain, i.e. TPP-23411 comprises the lysine. TPP-23411 and TPP-21360 were tested in a separate FACS experiment for binding to human and cynomolgus CCR8. The EC50 curves for binding of human CCR8 as well as cynomolgus CCR8 were perfectly aligned between the two antibodies (data not shown, cf. Table 10.1.1.2 for IC50 values).

TABLE 10.1.1.2
EC50 values of candidates measured in nM. Staining was performed on CHO cells stably
expressing either human CCR8 or cynomolgus CCR8.

| | TPP-21360 | TPP-23411 |
|---|---|---|
| CHO with hCCR8: EC50 in nM | 1.4 | 1.7 |
| CHO with cynoCCR8: EC50 in nM | 0.8 | 0.9 |

[1899] TPP-21181 and TPP-23411 were tested in a separate FACS experiment for binding to human and cynomolgus CCR8, cf. FIG. 9, 10. Respective EC50 values are listed in Table 10.1.1.3.

TABLE 10.1.1.3
EC50 values of antibodies measured in nM.
Staining was performed on CHO cells stably
expressing either human CCR8 or cynomolgus CCR8.

| | TPP-21181 | TPP-23411 |
|---|---|---|
| CHO with hCCR8: EC50 in nM | 4.8 | 4.4 |
| CHO with cynoCCR8: EC50 in nM | 1.8 | 1.3 |

[1900] In a further FACS experiment, prior art antibodies L263G8 (Biolegend) and 433H (ICOS, BD) were compared to TPP-21360 with regards to binding to human and cynomolgus CCR8, cf. FIG. 11, 12 and Table 10.1.1.4. Prior art antibodies showed only low or substantially no overall binding to cynomolgus CCR8 (low saturation, here MFI <<1000). Only the antibodies according to the current invention specifically recognized human and cynomolgus CCR8 with affinities in the same order of magnitude, i.e. in some cases even in the sub nanomolar range.

TABLE 10.1.1.4
EC50 values of TPP-21360 compared to
L263G8 and 433H. Staining was performed on
CHO cells stably expressing either human CCR8 or cynomolgus CCR8.

| | TPP-21360 | L263G8 | 433H |
|---|---|---|---|
| CHO with hCCR8: EC50 in nM | 0.58 | 0.31 | 2.8 |
| CHO with cynoCCR8: EC50 in nM | 0.51 | 132 | 12.1 |

[1901] These results show that the use of the sulfated antigen facilitates the generation of cross-reactive antibodies such as cynomolgus/human for difficult targets such as CCR8, which are specific for their intended target. As a proof of concept, activated human Tregs were stained with inventive antibody TPP-23411 or prior art antibody L263G8, as shown in FIG. 13. The inventive antibodies which recognize murine CCR8 have likewise excellent affinities for their target, as shown in Table 10.1.1.5.

TABLE 10.1.1.5
EC50 values of TPP-14095 and TPP-14099. FACS staining
was performed on CHO cells expressing murine CCR8.

| | TPP-14095 | TPP-14099 |
|---|---|---|
| EC50 in nM | 0.7 | 3 |

[1902] Table 10.1.1.6 shows EC50 values for binding of various further inventive anti-human CCR8 antibodies to CHO cells transfected with human CCR8 or cynomolgus CCR8, or to Hut78 cells expressing endogenous human CCR8. Interestingly, antibodies having a G50A mutation had a higher binding affinity to CHO cells expressing cynomolgus CCR8. Anti-CCR8 antibodies comprising this framework mutation are therefore preferred.

TABLE 10.1.1.6
EC50 values in M characterizing the binding of
inventive anti-human CCR8 antibodies to
CHO cells transfected with human CCR8 or cynomolgus
CCR8, as described elsewhere herein, or to cell
line HuT78, which endogenously expresses human CCR8.

| Antibody | hCCR8:CHO EC50 [M] | cynoCCR8:CHO EC50 [M] | HuT78 EC50 [M] |
|---|---|---|---|
| TPP-17577 | 1.11E−08 | 9.81E−09 | |
| TPP-17578 | 1.15E−08 | 2.72E−09 | 1.78E−07 |
| TPP-18205 | 8.33E−09 | 8.59E−08 | 1.41E−07 |
| TPP-18206 | 2.63E−09 | 2.23E−09 | 4.70E−08 |
| TPP-20955 | 4.69E−10 | 4.75E−10 | 4.56E−10 |
| TPP-21047 | 2.56E−09 | 3.77E−10 | 5.02E−09 |
| TPP-23411 | 1.38E−09 | 7.76E−10 | 2.78E−09 |
| TPP-27495 | 1.32E−09 | 5.35E−10 | 3.25E−09 |
| TPP-27496 | 1.51E−09 | 4.55E−10 | 3.68E−09 |
| TPP-18429 | 1.48E−09 | 2.25E−09 | 2.93E−08 |
| TPP-18430 | 1.69E−09 | 1.37E−09 | 5.24E−08 |
| TPP-18432 | 2.21E−09 | 3.33E−09 | 1.91E−08 |
| TPP-18433 | 1.48E−09 | 1.92E−09 | 3.30E−08 |
| TPP-18436 | 1.12E−09 | 4.42E−10 | 3.76E−09 |
| TPP-19571 | 1.48E−09 | 8.79E−10 | 1.49E−09 |
| TPP-27478 | 2.74E−09 | 1.02E−09 | |
| TPP-27477 | 1.01E−09 | 4.18E−10 | 2.10E−09 |
| TPP-27479 | 2.22E−09 | 5.88E−09 | 1.31E−08 |
| TPP-27480 | 1.14E−09 | 7.70E−10 | 4.71E−09 |

### Example 10.1.2: SPR Experiments for Characterization of Binding Affinities of Antibodies for Unmodified TRD Domains of Different Species

[1903] To analyze the affinity of the antibodies for their unmodified (i.e. non-sulfated) antigen, surface plasmon resonance (SPR) binding assays were performed on a Biacore T200 instrument at 25° C. with assay buffer HBS-EP+ 1×, 1 mg/ml BSA, 300 mM NaCl. IgGs were captured using anti-human Fc IgGs covalently amine coupled to a CM5 sensor chip. N terminally His6-tagged human CCR8 TRD (TPP-19950: MDYTLDLSVTTVTDYYYPDIFSSP, SEQ ID NO:43), cynomolgus CCR8 TRD (TPP-19952: MDYTLDPSMTTMTDYYYPDSLSSP, SEQ ID NO:44) or murine CCR8 TRD (TPP-19951: MDYTMEPNVTMTDYYPDFFTAP, SEQ ID NO:45) was C-terminally fused with human serum albumin (HSA) to generate the CCR8-HSA fusion proteins. The respective CCR8-HSA fusion protein was used as analyte with a concentration range of 1.56-200 nM in multicycle kinetics mode. Obtained sensorgrams were fitted to a 1:1 Langmuir binding model. For human anti-human CCR8 antibodies TPP-23411 and TPP-21360, binding was low (160 nM) and binding to cynomolgus CCR8 TRD was even lower, e.g. in the μM range, supporting the importance of sulfation for the antibody recognition for the inventive antibodies.

TABLE 10.1.2.1
Binding affinities of inventive antibodies for the His6-tagged HSA-fused
TRD of human, cynomolgus or murine CCR8 determined by SPR.
Binding to cynomolgus CCR8 peptide is in the μM range and is an
approximation as the highest concentration tested was 200 nM. HSA
alone and isotype controls did not show any binding (data not shown).

| Ligand | Analyte | kₐ [1/Ms] | k_{d} [1/s] | K_{D} [M] |
|---|---|---|---|---|
| TPP-21360 | cyno | 3.5E+04 | 1.3E−01 | 3.8E−06 |
| | human | 1.2E+05 | 1.8E−02 | 1.6E−07 |
| | mouse | no binding | | |
| TPP-14099 | cyno | no binding | | |
| | human | no binding | | |
| | mouse | 2.2E+03 | 1.1E−03 | 5.2E−07 |
| TPP-23411 | cyno | 6.2E+03 | 1.2E−01 | 2.0E−05 |
| | human | 1.1E+05 | 1.7E−02 | 1.6E−07 |

| | |
|---|---|
| mouse | no binding |

### Example 10.1.3: SPR Experiments for Systematic Characterization of Binding Affinities

[1904] SPR binding assays were performed to systematically evaluate antibody binding to a) non-sulfated vs sulfated antigen, b) TRD vs N term and c) human vs cynomolgus CCR8. SPR binding assays were performed on a Biacore T200 instrument (Cytiva) at 25° C. with assay buffer 1× HBS-EP+(order no. BR100826, Cytiva). Peptides were used as ligands and were captured using their C-terminal biotin label on to a streptavidin coated sensor chip (“Sensor Chip SA”, Order No. BR100398, Cytiva). To this end, a terminal lysine (K) was added at the C-term of each peptide for biotinylation. For the N term of CCR8, the naturally occurring cysteine between TRD and LID domain was replaced by a serine. Antibodies were used as analytes (TPP-19546, TPP-21181, TPP-23411, hIgG1 isotype control TPP-9809 and mIgG2a isotype control TPP-10748). The concentration of analyte in assay buffer was 0.05-10 nM and the measurement was performed in multicycle kinetics mode. The sensor surface was regenerated with glycine pH 2.0 after each cycle. Obtained sensorgrams were double referenced (subtraction of reference flow cell signal and buffer injection) and were fitted to a 1:1 Langmuir binding model to derive kinetic data using the Biacore T200 Evaluation software.

TABLE 101.3.1
List of peptides used to characterize the epitope of the antibodies. Peptides
comprising the TRD sequence (# 1 to 4) or N term (# 5 to 8) of CCR8, derived from
cynomolgus (# 1, 2, 5, 6) or human (# 3, 4, 7, 8) CCR8, either sulfated (# 2, 4, 6, 8)
or non-sulfated (# 1, 3, 5, 7). SO3: sulfate residue. Biot: biotin modification
for immobilization.

| # | Type | Peptide Sequence |
|---|---|---|
| 1 | Cyno_TRD | H-CMDYTLDPSMTTMTDYYYPDSLSSPK(Biot)-OH |
| 2 | Cyno_TRD_Ys | H-CMDY(SO3)TLDPSMTTMTDY(SO3)YY(SO3)PDSLSSPK(Biot)-OH |
| 3 | HUMAN_TRD | H-CMDYTLDLSVTTVTDYYYPDIFSSPK(Biot)-OH |
| 4 | HUMAN_TRD_Ys | H-CMDY(SO3)TLDLSVTTVTDY(SO3)YY(SO3)PDIFSSPK(Biot)-OH |
| 5 | Cyno_NTerm | H-CMDYTLDPSMTTMTDYYYPDSLSSPSDGELIQRNDKK(Biot)-OH |
| 6 | Cyno_NTerm_Ys | H- |
| | | CMDY(SO3)TLDPSMTTMTDY(SO3)YY(SO3)PDSLSSPSDGELIQRN |
| | | DKK(Biot)-OH |
| 7 | HUMAN_NTerm | H-CMDYTLDLSVTTVTDYYYPDIFSSPSDAELIQTNGKK(Biot)-OH |
| 8 | HUMAN_NTerm_Ys | H- |
| | | CMDY(SO3)TLDLSVTTVTDY(SO3)YY(SO3)PDIFSSPSDAELIQTNG |
| | | KK(Biot)-OH |

[1905] For the analyzed inventive antibodies TPP-19546, TPP-21181, and TPP-23411, no binding to the non-sulfated TRD or non-sulfated N term of CCR8 was detected, independent of the species. In contrast, excellent affinities with K_{D} values in the pM range were determined for sulfated TRD and sulfated N-term, e.g. of cynomolgus and/or human CCR8. In some cases, the K_{D} value for binding to the TRD and to the N term of human CCR8 was substantially the same, i.e. within the error margin. In other cases, the binding to the N term was slightly improved.

[1906] In summary, these results demonstrate that sulfated tyrosine is causal for the binding. They furthermore suggest, that the sulfated TRD is necessary and sufficient for binding, but that the presence of the complete N term as epitope may in some cases further improve the binding. Finally, these results also demonstrate the cross-reactivity for human and cynomolgus CCR8.

TABLE 10.1.3.1
SPR binding affinities of inventive antibodies for the TRD or N term of cynomolgus or
human CCR8. Peptides with odd numbers are characterized by unmodified tyrosines, peptides with even
numbers are characterized by sulfated tyrosines (Ys). Isotype controls did not show binding to any of the
peptides (data not shown). 1) mp = multiphasic: approximated values.

| | | | | | | | Ligand | Activity | |
|---|---|---|---|---|---|---|---|---|---|
| | | Anti- | kₐ | k_{d} | K_{D} | R_{Max} | Level | in | |
| Peptide | # | body | (1/Ms) | (1/s) | (M) | (RU) | (RU) | % | 1) |
| Cyno_TRD | 1 | IgG01_ | | no binding | | | 12 | | |
| Cyno_TRD_Ys | 2 | TPP- | 4.92E+06 | 8.44E−04 | 1.71E−10 | 46 | 12.4 | 81.8 | mp |
| HUMAN_TRD | 3 | 19546 | | no binding | | | 17 | | |
| HUMAN_TRD_Ys | 4 | | 6.69E+06 | 1.62E−03 | 2.42E−10 | 36 | 14.5 | 54.8 | mp |
| Cyno_NTerm | 5 | | | no binding | | | 27 | | |
| Cyno_NTerm_Ys | 6 | | 1.67E+07 | 1.54E−03 | 9.22E−11 | 58 | 12 | 106.9 | mp |
| HUMAN_NTerm_ | 7 | | | no binding | | | 14 | | |
| HUMAN_NTerm_ | 8 | | 2.61E+07 | 4.19E−03 | 1.60E−10 | 24 | 21 | 25.2 | mp |
| Ys | | | | | | | | | |
| Cyno_TRD | 1 | IgG02_ | | no binding | | | 12 | | |
| Cyno_TRD_Ys | 2 | TPP- | 4.23E+09 | 5.87E+00 | 1.39E−09 | 30 | 12.4 | 52.9 | mp |
| HUMAN_TRD | 3 | 21181 | | no binding | | | 17 | | |
| HUMAN_TRD_Ys | 4 | | 5.56E+09 | 1.60E+01 | 2.87E−09 | 16 | 14.5 | 23.8 | mp |
| Cyno_NTerm | 5 | | | no binding | | | 27 | | |
| Cyno_NTerm_Ys | 6 | | 1.23E+10 | 1.07E+01 | 8.68E−10 | 43 | 12 | 78.5 | mp |
| HUMAN_NTerm | 7 | | | no binding | | | 14 | | |
| HUMAN_NTerm_ | 8 | | 7.69E+06 | 2.22E−02 | 2.88E−09 | 16 | 21 | 17.0 | mp |
| Ys | | | | | | | | | |
| Cyno_TRD | 1 | IgG03_ | | no binding | | | 12 | | |
| Cyno_TRD_Ys | 2 | TPP- | 4.38E+06 | 4.54E−04 | 1.04E−10 | 46 | 12.4 | 82.1 | mp |
| HUMAN_TRD | 3 | 23411 | | no binding | | | 17 | | |
| HUMAN_TRD_Ys | 4 | | 2.86E+06 | 4.40E−04 | 1.54E−10 | 47 | 14.5 | 71.0 | mp |
| Cyno_NTerm | 5 | | | no binding | | | 27 | | |
| Cyno_NTerm_Ys | 6 | | 8.21E+06 | 4.64E−04 | 5.65E−11 | 62 | 12 | 112.9 | mp |
| HUMAN_NTerm | 7 | | | no binding | | | 14 | | |
| HUMAN_NTerm_ | 8 | | 9.19E+06 | 8.05E−04 | 8.76E−11 | 32 | 21 | 33.6 | mp |
| Ys | | | | | | | | | |

### Example 10.2: Specificity of Binding

[1907] FACS analysis was performed as described elsewhere herein to determine unspecific binding to target negative human cell lines. No unspecific binding of anti-human CCR8 antibody TPP-23160 was observed for CHO cells with mock transfectants (FIG. 14).

[1908] In addition, HEK cells were transiently transfected with human CCR1 or human CCR4. Off target binding was low for most of the inventive antibodies (FIG. 15, 16).

[1909] A cell panel with cell lines from different tumor tissues was used to characterize unspecific binding in these tissues (Table 10.2.1). The overall profile was favorable for most antibodies, while a certain degree of polyreactivity could be observed for some antibodies. Overall, the degree of polyreactivity was in an acceptable range for therapeutic applications for all inventive antibodies. However, TPP-20950, TPP-18206, TPP-18429, TPP-18430, and TPP-18433 showed a higher degree of polyreactivity and showed a certain degree of binding in at least two or three out of the seven cell lines shown below.

TABLE 10.2.1
Polyreactivity of inventive antibodies in a cell panel. If applicable, EC50 is shown in M.

| | | | | | | | Burkitt |
|---|---|---|---|---|---|---|---|
| | Liver | Liver | Kidney | Kidney | Lung | Colon | lymphoma |
| Antibody | HepG2 | SKHep1 | 786-O | A498 | H292 | HT29 | Raji |
| TPP-19546 | none | none | none | none | none | none | |
| TPP-20950 | none | none | none | 8.35E−07 | 7.59E−07 | none | |
| TPP-20955 | none | none | none | none | none | none | |
| TPP-21045 | 1.48E−07 | none | none | none | none | none | |
| TPP-21360 | none | none | none | none | none | none | |
| TPP-5657 | none | none | none | none | none | none | |
| (Isotype) | | | | | | | |
| TPP-17577 | none | none | none | none | none | none | none |
| TPP-17578 | none | none | none | none | none | none | none |
| TPP-18205 | none | none | none | none | binding | none | none |
| TPP-18206 | binding | binding | binding | none | none | none | none |
| TPP-20955 | none | none | none | none | none | none | none |
| TPP-21047 | none | none | none | none | none | none | none |
| TPP-23411 | none | none | none | none | none | none | none |
| TPP-27478 | none | none | none | none | none | none | none |
| TPP-27479 | none | none | none | none | none | none | none |
| TPP-27480 | none | none | none | none | none | none | none |
| TPP-27477 | none | none | none | none | none | none | none |
| TPP-27477 | none | none | none | none | none | none | none |
| TPP-27460 | none | none | none | none | none | none | none |
| TPP-27461 | none | none | none | none | none | none | none |
| TPP-27496 | none | none | none | none | none | none | none |
| TPP-27495 | none | none | none | none | none | none | none |
| TPP-18429 | binding | binding | binding | none | none | none | none |
| TPP-18430 | binding | binding | none | none | none | none | none |
| TPP-18432 | none | none | none | none | none | none | none |
| TPP-18433 | binding | binding | none | none | none | none | none |
| TPP-18436 | none | none | none | none | none | none | none |
| TPP-23411 (afuco) | none | none | none | none | none | none | none |

[1910] A first ELISA based experiment was performed to analyze unspecific binding to BVP, insulin or DNA for antibodies TPP-18206, TPP-17578, TPP-19546 and TPP-23411 and two reference antibodies. Unspecific binding of the inventive antibodies to insulin, DNA and/or BVP was lower than unspecific binding of the first reference antibody (Gantenerumab, Roche) to these antigens, and was also lower than unspecific binding of the second reference antibody (Remicade, Janssen Biotech) to these antigens. Among the tested inventive antibodies, TPP-23411 showed the lowest polyreactivity for each of DNA, BVP and insulin.

[1911] A second ELISA based experiment was performed to analyze unspecific binding to BVP, insulin or DNA for antibodies TPP-18206 (wt or afuco), TPP-21360 afuco, TPP-23411 (wt or afuco), TPP-20955, TPP-21047, and references TPP-9809 (isotype control), Gantenerumab (TPP-12151), Lenzilumab (TPP-12166), Remicade (TPP-12160) and Avastin (TPP-17586). Unspecific binding of the tested inventive antibodies to insulin, DNA as well as BVP was lower than unspecific binding of the first reference antibody (Gantenerumab, Roche). TPP-20955 and TPP-21047 showed overall more unspecific binding than the other inventive antibodies (data not shown). Overall, the degree of polyreactivity was in an acceptable range for therapeutic applications for all inventive antibodies, independent of their afucosylation status.

[1912] A third ELISA based experiment was performed to analyze unspecific binding to BVP, insulin or DNA for antibodies TPP-27495 (YTE), TPP-27496 (LS), TPP-18429, TPP-18430, TPP-18432, TPP-18433, TPP-18436, TPP-27479, TPP-27480 and control antibodies. Overall, the degree of polyreactivity was in an acceptable range for therapeutic applications for all inventive antibodies, independent of YTE or LS mutations.

[1913] Unwanted binding of inventive CCR8 antibodies to immune cell populations different from human Tregs was analyzed by staining of these cell populations, cf. FIG. 17.

[1914] FIG. 18 shows upregulation of CCR8 on human Tregs after activation.

### Example 10.3: Evaluation of ADCC and ADCP Induction

### Example 10.3.1: Afucosylation of Antibodies

[1915] The antibodies according to the current invention were glycoengineered using GlymaxX technology, cf. U.S. Pat. No. 8,642,292, to improve the interaction between the antibodies FC region and the FC receptor expressed by the effector cells. In brief, the technology is based on the heterologous, cytosolic co-expression of bacterial enzyme GDP-6-deoxy-D-lyxo-4-hexulose reductase that redirects the de novo fucose synthesis pathway towards sugar-nucleotide GDP-Rhamnose that cannot be metabolized by eukaryotic cells. This depletes the fucose pool and leads to the production of afucosylated antibodies, both on the core part (no core fucose) and on the variable part (no antennary fucose) of an N-glycan. It also inhibits the fucosylation of O-glycans and protein-O-fucosylation. Removal of fucose from N-glycans on N297 resulted in an increased affinity to FcγRs, as shown in example 10.3.2.

### Example 10.3.2: Human Fcγ Receptor Binding Analysis Based on SPR

[1916] To determine the ability of the inventive antibodies and their afucosylated versions to bind the respective FC receptors expressed on the human effector cells involved in ADCC or ADCP, SPR binding assays were performed on a T200 instrument at 25° C. with a CM5 sensor chip and assay buffer HBS-EP+500 mM NaCl. FcγR variants were captured via an amine coupled anti-His capture antibody (ab) and IgGs were used as analyte at concentrations up to 25 μM. KD values were derived from a steady state affinity analysis or from kinetic data fitted to a 1:1 Langmuir isotherm. Afucosylated versions of the antibodies showed increased binding to both human and cynomolgus FcgRIIIa, suggesting an improved ADCC induction and thus Treg depletion for the inventive antibodies in their afucoslyated form in both species (Table 10.3.2.1).

[1917] Furthermore, a comparable affinity for both, cynomolgus and human FcγRIII is important to model the ADCC efficacy in a cynomolgus animal model. These model systems are particularly important in tumor immunology because rodent models are often not suited to reflect immunological side effects of a therapeutic antibody. The afucosylated antibodies according to the current invention showed highly comparable affinities for the respective FC receptors in cynomolgus and human.

TABLE 10.3.2.1
SPR analysis of affinities of inventive antibodies for different FC receptors. Italics: approximation only as highest concentration was 25 μM
and no saturation was reached; n.e .: not evaluable; n.b .: no binding; res. bdg .: residual binding, not quantitatively evaluable; KD >25 μM:
fitted value outside of saturation. curve. TPP-9809: isotype control.

| | | | Human | | | | | | | |
|---|---|---|---|---|---|---|---|---|---|---|
| | | | Fc | Human | | Human Fc | | | | |
| | | | gamma | Fc | Human Fc | gamma | Human Fc | | | |
| | | Human Fc | RIIA/ | gamma | gamma | RIIIA / | gamma RIIIA / | Cyno Fc | Cyno Fc | Cyno Fc |
| | Engi- | gamma | CD32a | RIIIB/ | RIIB/C | CD16a | CD16a (F176) | gamma | gamma | gamma |
| KD [M] | neered | RI/CD64 | (R167) | CD16b | (CD32b/c) | (V176) | (Acro) | RIII/CD16 | RIIA/CD32a | RIIB/CD32b |
| TPP-19546 | Afuco | 1.10E−08 | 2.20E−05 | 4.30E−06 | n.b. | 3.40E−07 | 4.20E−07 | 1.40E−07 | KD > 25 μM | KD > 25 μM |
| TPP-19546 | | 1.80E−07 | n.b. | n.b. | n.b. | 4.80E−06 | KD > 10 μM | 3.10E−06 | n.b. | n.b. |
| TPP-20950 | Afuco | 1.10E−07 | 1.70E−05 | 4.60E−06 | KD > 25 μM | 2.80E−07 | 3.70E−07 | 1.70E−07 | KD > 25 μM | KD > 25 μM |
| TPP-20950 | | 1.80E−07 | n.b. | n.b. | n.b. | 7.60E−06 | KD > 20 μM | 5.80E−06 | n.b. | n.b. |
| TPP-20955 | Afuco | 1.40E−07 | 6.20E−06 | 3.10E−06 | 9.80E−06 | 3.40E−07 | 4.20E−07 | 1.80E−07 | KD > 25 μM | KD > 25 μM |
| TPP-20955 | | 2.80E−07 | n.b. | n.b. | n.b. | 8.90E−06 | KD > 25 μM | 5.60E−06 | n.b. | n.b. |
| TPP-20965 | Afuco | 1.10E−07 | 1.60E−05 | 4.60E−06 | n.b. | 4.30E−07 | 5.20E−07 | 1.90E−07 | KD > 25 μM | KD > 25 μM |
| TPP-20965 | | 2.00E−07 | KD > 25 | n.b. | n.b. | 3.10E−06 | 7.60E−06 | 2.30E−05 | n.b. | n.b. |
| | | | μM | | | | | | | |
| TPP-21045 | Afuco | 7.95E−09 | 1.06E−05 | 3.31E−06 | n.b. | 2.88E−07 | 3.16E−07 | 1.17E−07 | KD > 25 μM | KD > 25 μM |
| TPP-21045 | | 7.62E−08 | KD > 25 | n.b. | n.b. | 3.84E−06 | KD > 25 μM | 2.23E−06 | n.b. | n.b. |
| | | | μM | | | | | | | |
| TPP-21047 | Afuco | 7.73E−08 | 9.00E−06 | 2.97E−06 | KD > 25 μM | 2.44E−07 | 2.68E−07 | 9.39E−08 | KD > 25 μM | KD > 25 μM |
| TPP-21047 | | 7.26E−08 | 1.51E−05 | n.b. | KD > 25 μM | 2.79E−06 | 1.01E−05 | 1.46E−06 | KD > 25 μM | KD > 25 μM |
| TPP-21360 | Afuco | 1.32E−07 | 1.22E−05 | 4.63E−06 | KD > 25 μM | 4.01E−07 | 4.78E−07 | 1.74E−07 | KD > 25 μM | KD > 25 μM |
| TPP-21360 | | 2.72E−07 | n.b. | n.b. | n.b. | 5.76E−06 | KD > 25 μM | 3.39E−06 | n.b. | n.b. |
| TPP-9809 | Afuco | 1.32E−07 | 1.29E−05 | 5.03E−06 | KD > 25 μM | 4.59E−07 | 5.68E−07 | 2.13E−07 | KD > 25 μM | KD > 25 μM |
| TPP-9809 | | 1.69E−07 | 1.74E−05 | KD > 25 | KD > 25 μM | 5.43E−06 | 1.38E−05 | 4.28E−06 | KD > 25 MM | KD > 25 uM |
| | | | | μM | | | | | | |
| TPP-9809 | wild | 2.30E−07 | 1.77E−05 | 1.96E−05 | KD > 25 μM | 5.57E−06 | 1.32E−05 | 2.26E−06 | KD > 25 μM | 1.84E−05 |
| | type | | | | | | | | | |

### Example 10.3.3: ADCC Induction Mediated by CCR8 Antibodies

### Example 10.3.3.1: ADCC Induction Mediated by Anti-Human CCR8 Antibodies

[1918] For functional ADCC assays, either HEK cells expressing human CCR8 or activated human Tregs were used as target cells, and NK92v-GPF-CD16 176V (NantKwest) were used as effector cells. In a 96 well tissue culture treated plate, a co-culture of the respective target cells expressing CCR8 with effector cells at a ratio of 4:1 in the presence of various concentration of therapeutic antibody were incubated in RPMI 1640 with, 1% heat inactivated FBS, 100 U/ml Pen/Strep, 1 mN Na-pyruvate, and 1× NEAA. Digitonin was used for maximum lysis, and CytoTox-Glo (Promega) was added to the assay at the end of a 2 hr incubation. Raw luminescent values were determined using the CytoTox-glo Promega program. The Mean Max Background, MMB=(Target Max)−(Target Spontaneous) is used to calculate % lysis. % Lysis=(Raw Luminescent−no ab)/MMB×100.

[1919] For antibody candidates TPP-19546 (upper panel) and TPP-21360 (lower panel), afucosylation increased ADCC induced cytotoxicity to ˜50 and ˜70% respectively in HEK cells expressing human CCR8 (cf. FIG. 19). On activated human Tregs with about 85% CCR8 expression, ADCC derived cytotoxicity resulting from afucosylated TPP-21360 or TPP-23411 was as high as 59% or 52% (cf. FIG. 20, Table 10.3.3.1.3). For afucosylated TPP-21360 the average EC50 of % cytotoxicity for activated human Tregs with about 85% CCR8 expression using NK92v as effector cells was ˜20 pM. Tables 10.3.3.1.1 to 10.3.3.1.6 show the results for different inventive antibodies and/or different donors.

TABLE 10.3.3.1.1
ADCC assay summary: EC50 and Max response using activated Tregs
as target cells and NK92v cell line as effector cells.
ADCC Potency

| | | Donor 1730 | | Donor 1213 | |
|---|---|---|---|---|---|
| | | | Max | | Max |
| | | EC₅₀ | Response | EC₅₀ | Response |
| Antibody | Isotype | (nM) | (%) | (nM) | (%) |
| TPP-17577 | WT | 5.76E+11 | 13 | ~7.98e+014 | 10 |
| | Afuco | 4.57 | 40 | 1.85 | 41 |
| TPP-18342 | WT | 1.50 | 15 | 0.37 | 25 |
| | Afuco | 0.28 | 40 | 0.295 | 62 |
| TPP-17578 | WT | 1.97E+05 | 8 | | 5 |
| | Afuco | 19.0 | 38 | 9.2 | 25 |
| TPP-18205 | WT | ~1.8e−2 | 24 | ~5.58e−3 | 20 |
| | Afuco | 1.05 | 58 | 0.23 | 52 |
| TPP-18206 | WT | 4.68 | 12 | 8.59E+15 | 4 |
| | Afuco | 1.68 | 51 | 0.23 | 47 |
| TPP-9809 | Afuco | | 6 | | 4 |
| Mogamulizumab | | 1.09 | 65 | 0.31 | 58 |

TABLE 10.3.3.1.2
ADCC assay summary: EC50 and Max response using activated Tregs as target cells
and NK92v cell line as effector cells. All TPPs used in this assay were afucosylated.
ADCC potency (Donor 1100)

| | TPP- | TPP- | TPP- | TPP- | TPP- | | |
|---|---|---|---|---|---|---|---|
| | 19546 | 21360 | 20945 | 20950 | 20955 | Iso afuco | Moga |
| hTreg EC₅₀ (pM) | 8840 | 4.41 | 3.2 | 9.51 | 5.82 | NA | 35.2 |
| Max Response (%) | 54 | 98 | 96 | 97 | 91 | 36 | 96 |
| R² | 0.75 | 0.80 | 0.61 | 0.89 | 0.50 | NA | 0.94 |

TABLE 10.3.3.1.3
ADCC assay summary: EC50 and Max response using activated Tregs as target cells
and NK92v cell line as effector cells. The activated human Treg used in this study had about 85% CCR8
expression.
ADCC potency (Donor 1100)

| | TPP-21360 | | TPP-23411 | | TPP-9809 | | |
|---|---|---|---|---|---|---|---|
| | WT | Afuco | WT | Afuco | WT | Afuco | Moga |
| hTreg EC50 (pM) | 271 | 18.5 | 10763 | 22.1 | NA | NA | 193.4 |
| Max Response (%) | 26 | 59 | 27 | 52 | 8 | 8 | 74 |
| R² | 0.97 | 0.98 | 0.61 | 0.96 | NA | NA | 0.89 |

TABLE 10.3.3.1.4
ADCC assay summary: EC50 and Max response using activated Tregs as target cells
and NK92v cell line as effector cells. The activated human Treg used in this study had only about 31%
CCR8 expression.
ADCC potency (Donor 1261)

| | TPP-21360 | | TPP-23411 | | TPP-9809 | | |
|---|---|---|---|---|---|---|---|
| | WT | Afuco | WT | Afuco | WT | Afuco | Moga |
| hTreg EC50 (pM) | 81.3 | 65.6 | ~157 | 55.9 | NA | NA | 86.4 |
| Max Response (%) | 13 | 25 | 8 | 24 | 2 | 3 | 71 |
| R² | 0.27 | 0.90 | 0.30 | 0.64 | NA | NA | 0.97 |

TABLE 10.3.3.1.5
ADCC assays: EC50 and Max response using HEK cells expressing
human CCR8 (>95% CCR8) as target cells and NK92v cell line as
effector cells.
ADCC Potency: HEK-hCCR8 + NK92v

| Afucosylated | TPP-27479 | TPP-27478 | TPP-23411 | TPP-9809 |
|---|---|---|---|---|
| EC50 (pM) | 363 | 110 | 141 | N/A |
| Max Response | 32 | 35 | 35 | 17 |
| (%) | | | | |
| R² | 0.94 | 0.82 | 0.85 | N/A |

ADCC Potency: HEK-hCCR8 + NK92v

| Afucosylated | TPP-29369 | TPP-29367 | TPP-23411 | TPP-9809 |
|---|---|---|---|---|
| EC50 (pM) | 26.3 | 137 | 68.7 | N/A |
| Max Response | 38 | 22 | 34 | 7 |
| (%) | | | | |
| R² | 0.65 | 0.36 | 0.71 | N/A |

TABLE 10.3.3.1.6
ADCC assays: EC50 and Max response using HEK cells expressing
human CCR8 (>95 % CCR8) as target cells and NK92v cell line as
effector cells.
ADCC Potency: HEK-hCCR8 + NK92v

| Afucosylated | TPP-29369 | TPP-29367 | TPP-23411 | TPP-29368 | TPP-9809 |
|---|---|---|---|---|---|
| EC50 (pM) | 99 | 460 | 167 | 2892 | N/A |
| Max Response (%) | 36 | 31 | 41 | 25 | 20 |
| R² | 0.91 | 0.3 | 0.89 | 0.72 | N/A |

ADCC Potency: HEK-hCCR8 + NK92v

| n = 2 | TPP-27479 | TPP-27478 | TPP-23411 | TPP-29368 | TPP-9809 |
|---|---|---|---|---|---|
| EC50 (pM) | 823 | 11 | 182 | 2292 | N/A |
| Max Response (%) | 25 | 32 | 25 | 26 | 8 |
| R² | 0.67 | 0.57 | 0.66 | 0.36 | N/A |

### Example 10.3.3.2: ADCC Induction Mediated by Anti-Mouse CCR8 Antibodies (Surrogate Antibodies)

[1920] To compare the behavior of the inventive human anti-human/cyno CCR8 antibodies with the inventive human anti-murine CCR8 surrogate antibodies, the latter were likewise characterized for ADCC induction. The functional ADCC assay for the surrogate antibodies was performed using primary murine NK cells as effector cells and murine CCR8 expressing HEK293 cells and BW 5417.3 (data not shown) as target cells. Ultra-low IgG containing medium was used during coculturing to avoid unspecific binding of CCR8 antibodies to serum IgGs. Furthermore, to more closely reflect the in vivo situation, target cells were first preincubated with surrogate CCR8 antibodies before effector cells were added, allowing for better FcγRIII clustering on effector cells, that is the early step of ADCC mode-of-action. Effector and target cells were cocultured at a ratio of 10:1 in RPMI 1640 with, 1% Ultra-low IgG FBS One Shot medium for 20 hours using U-bottom 96-well plates. Surrogate anti-murine CCR8 antibody TPP-15285 and isotype control antibody TPP-10748 were used in various concentration steps. Cytotoxicity was determined using the CytoTox-Glo™ Cytotoxicity Assay (Promega) (% Cytotoxicity=[(Experimental value−Control w/o antibody/(Maximal lysis of target cells−Spontaneous lysis of target cells)]×100%). Experimental values were determined by coculture of target cells with effector cells after addition of surrogate CCR8 antibodies. Control values were determined by coculture of target cells with effector cells without addition of inventive antibodies. Maximal lysis values were determined for target cells where Digitonin had been added at the start of the assay. Spontaneous lysis values were determined by measuring the spontaneous lysis of target cells in assay medium without addition of any further reagents. 92% to 97% of target cells showed expression of murine CCR8 (determined by FACS). The ADCC-related cytotoxicity for TPP-15285 was ˜39% and the mean EC50 was ˜111 pM (Table 10.3.3.2.1). The highest inventive antibody concentration resulted in a hook effect, further supporting the suggested ADCC-based mode-of-action. The optimized functional ADCC assay thus confirmed that ADCC is a relevant mode of action for the in vivo efficacy of the inventive surrogate CCR8 antibodies and thus confirm the suitability of anti-murine CCR8 antibody TPP-15285 as surrogate antibody for the anti-human CCR8 antibodies.

TABLE 10.3.3.2.1
ADCC assay summary using fucosylated (wild type) surrogate
CCR8 antibodies.
ADCC potency (wild type)

| | TPP-15285 | TPP-10748 |
|---|---|---|
| EC₅₀ (PM) | 111 | NA |
| Max Response (%) | 39 | 7 |
| R² | 0.89 | NA |

TABLE 10.3.3.2.2
ADCC assays showing cytotoxicity in % induced by wild type
surrogate CCR8 antibody TPP-15285 (4 replicates).

| ng/ml | TPP-15285 | | | | TPP-10748 | | | |
|---|---|---|---|---|---|---|---|---|
| 10000 | 15.02 | 36.48 | 33.42 | 20.33 | −1.62 | 5.23 | 6.95 | −8.48 |
| 1000 | 15.04 | 38.89 | 39.03 | 35.56 | −0.77 | −2.64 | 3.93 | −0.76 |
| 100 | 22.44 | 29.84 | 28.11 | 43.39 | 3.27 | 3.99 | −0.64 | −1.41 |
| 10 | −2.14 | 8.68 | 3.88 | 35.69 | 11.76 | −1.64 | −7.4 | 1.79 |
| 1 | −8.82 | −7.13 | 5.02 | 11.33 | 5.46 | −3.06 | −5.7 | −0.72 |
| 0.1 | −8.4 | −2.87 | 5.78 | 9.85 | 10.44 | −8.69 | 4.64 | −0.8 |
| 0.01 | −12.68 | −2.77 | 10.75 | | 3.8 | 1 | 5.51 | |

### Example 10.3.4: ADCP Induction Mediated by Anti-CCR8 Antibodies

### Example 10.3.4.1: ADCP Induction Mediated by Anti-Human CCR8 Antibodies

[1921] To generate macrophage (M2c) effector cells, CD14+ cells were negatively selected (Miltenyi) from PBMC of healthy donors (AllCells). M2c macrophage differentiation was performed according to an eight days differentiation protocol provided by StemCell Tech (see FIG. 21). On the assay day, M2c were stained for expression of CD16, CD32, CD64, CD163, CD206, CD11b, CD80, and CD14 using FACS. The target cells were either HEK cells expressing human CCR8 or activated human Treg cells. Briefly, the target cells were labeled with carboxyfluorescein succinimidyl ester (CFSE) (ThermoFisher) according to the manufacturer's instructions. The target cells were incubated in a co-culture in 96 well plates with different concentrations of antibodies and effector cells at target to effector ratio of 4:1. In these assays, anti-CD47 (positive control) was added at 1 μg/ml; this gives enhanced response as it blocks do not eat me signal. After 3-4 hours incubation, the samples were run on MACSQuant or Attune flow cytometer. % phagocytosis was determined by CD206+CFSE+ double positive cells. CD206 is a marker expressed on macrophages.

[1922] M1 macrophages were generated similarly and from the same source material (fresh PBMC). In brief, CD14+ cells were isolated by negative selection and cultured for four days in serum-free media (StemCell Tech Immnocult) with, 50 ng/mL M-CSF. However, at day 5, M1 macrophages were polarized by addition of long/mL LPS+50 ng/mL IFN-g whereas M2c macrophage were polarized with the addition of 10 ng/mL IL-10.

[1923] FIG. 22 shows induction of phagocytosis in HEK cells expressing human CCR8 as target cells with in vitro differentiated macrophages M2c as effector cells. Both, wild type and afucosylated versions of inventive antibodies TPP-19546, TPP-21360 and TPP-23411 induced ADCP. FIGS. 23 and 24 and Tables 10.3.4.1.1 to 10.3.4.1.7 show the ADCP induction as characterized by EC50 and maximal response for multiple inventive antibodies, multiple donors and different macrophage populations. For all antibodies, a substantial degree of ADCP was observed.

TABLE 10.3.4.1.1
ADCP assay summary: EC50 and Max response using activated Tregs
as target cells and M2c macrophages as effector cells. All the TPPs
used in this assay were afucosylated. TPP-9809 is the isotype control.
For human Treg donor 1212 CCR8 was expressed by 40% of cells.
ADCP Potency (hTreg Donor 1212 + M2c Donor)

| | TPP- | TPP- | TPP- | TPP- | TPP- | TPP- |
|---|---|---|---|---|---|---|
| | 19546 | 21045 | 21360 | 20950 | 20955 | 9809 |
| EC50 (pM) | NA | 1220 | 577 | 128 | 408 | NA |
| Max | 20 | 30 | 39 | 32 | 29 | 15 |
| Response (%) | | | | | | |
| R² | NA | 0.49 | 0.88 | 0.71 | 0.83 | NA |

TABLE 10.3.4.1.2
ADCP assay summary: EC50 and Max response using activated Tregs as target
cells and M2c macrophages as effector cells. TPP-9809 is isotype control.
For human Treg donor 1163 CCR8 was expressed by 67% of cells.
ADCP Potency (hTreg Donor 1163 + M2c Donor 1)

| | TPP-19546 | | TPP-21045 | | TPP-21360 | TPP-20965 | TPP-9809 | |
|---|---|---|---|---|---|---|---|---|
| | WT | Afuco | WT | Afuco | Afuco | Afuco | WT | Afuco |
| EC50 (pM) | NA | NA | 130 | 30.1 | 205 | 766 | NA | NA |
| Max Response (%) | 14 | 15 | 27 | 28 | 39 | 44 | 11 | 10 |
| R² | NA | NA | 0.95 | 0.88 | 0.96 | 1.0 | NA | NA |

TABLE 10.3.4.1.3
ADCP assay summary: EC50 and Max response using activated Tregs as target
cells and M2c macrophages as effector cells. TPP-9809 is isotype control.
For human Treg donor 1163 CCR8 was expressed by 67% of cells.
ADCP Potency (hTreg Donor 1163 + M2c Donor 2)

| | TPP-19546 | | TPP-21045 | | TPP-21360 | TPP-20965 | TPP-9809 | |
|---|---|---|---|---|---|---|---|---|
| | WT | Afuco | WT | Afuco | Afuco | Afuco | WT | Afuco |
| EC50 (pM) | ~1.688e+007 | 404.4 | 162 | 52.9 | 105 | 300 | NA | NA |
| Max Response (%) | 18 | 18 | 27 | 28 | 37 | 36 | 11 | 14 |
| R² | 0.94 | 0.87 | 0.98 | 0.95 | 0.97 | 0.98 | NA | NA |

TABLE 10.3.4.1.4
ADCP assay summary: EC50 and Max response using activated Tregs as
target cells and M2c macrophages as effector cells. TPP-9809 is isotype
control. For human Treg donor 1212 CCR8 was expressed by 40% of cells.
ADCP Potency (human Treg Donor 1212 + M2c Donor 3)

| Afucosylated | TPP-20965 | TPP-21360 | TPP-21045 | TPP-20950 | TPP-20955 | TPP-9809 |
|---|---|---|---|---|---|---|
| EC50 (pM) | 163 | 51 | 9.2 | 23 | 14 | NA |
| Max Response (%) | 14 | 14 | 13 | 14 | 13 | 7 |
| R² | 0.99 | 0.96 | 0.79 | 0.93 | 0.96 | NA |

TABLE 10.3.4.1.5
ADCP assay summary: EC50 and Max response using activated Tregs as
target cells and M2c macrophages as effector cells. TPP-9809 is isotype
control. For human Treg donor 1212 CCR8 was expressed by 40% of cells.
ADCP Potency (human Treg Donor 1212 + M2c Donor 4)

| Afucosylated | TPP-20965 | TPP-21360 | TPP-21045 | TPP-20950 | TPP-20955 | TPP-9809 |
|---|---|---|---|---|---|---|
| EC50 (pM) | 563 | 27.5 | 17.1 | 10.7 | 13.2 | NA |
| Max Response (%) | 23 | 23 | 23 | 24 | 23 | 14 |
| R² | 0.93 | 0.99 | 0.99 | 0.97 | 0.98 | NA |

TABLE 10.3.4.1.6
ADCP assay summary: EC50 and Max response using
activated Tregs as target cells and M2c macrophages as
effector cells. TPP-9809 is isotype control.
ADCP Potency (human Treg Donor 1100 + M2c Donor 5)

| | TPP-21360 | | TPP-23411 | | TPP-9809 | |
|---|---|---|---|---|---|---|
| | WT | Afuco | WT | Afuco | WT | Afuco |
| EC50 (pM) | 1855 | 2003 | 1607 | 2188 | NA | NA |
| Max | 25 | 25 | 26 | 26 | 19 | 21 |
| Response (%) | | | | | | |
| R² | 0.94 | 0.90 | 0.87 | 0.90 | NA | NA |

TABLE 10.3.4.1.7
ADCP assay summary: EC50 and Max response using activated
Tregs as target cells and M2c macrophages as effector cells.
TPP-9809 is isotype control.
ADCP Potency (human Treg Donor 1261 + M2c Donor 6)

| | TPP-21360 | | TPP-23411 | | TPP-9809 | |
|---|---|---|---|---|---|---|
| | WT | Afuco | WT | Afuco | WT | Afuco |
| EC50 (pM) | 870 | 664 | 1257 | 613 | NA | NA |
| Max Response (%) | 24 | 23 | 23 | 23 | 17 | 18 |
| R² | 0.99 | 0.97 | 0.95 | 0.97 | NA | NA |

TABLE 10.3.4.1.7
ADCP assay summary with Incucyte live-imaging: EC50 and
Max response using macrophages as effector cells and human
CCR8 expressing HEK cells as target cells at ratio of 4:1. Human
CCR8 expression was 80%. TPP-9809 is isotype control. M2c
macrophages were plated into ultralow attachment 96-well-plates.
After addition of the therapeutic antibodies in various concentrations
the pHrodo red dye (Sartorius #4649) labeled target cells were
added and plates were incubated at 37° C. and 5% CO₂. Phase
contrast and red fluorescence images were automatically acquired
and analyzed every 30 min for 12 hours using 20x objective in
Incucyte S3 (4 pictures/well in triplicates). ADCP induction
varied for tested therapeutic wild type antibodies.
ADCP Potency (human CCR8-HEK + M2c Donor)

| | TPP- | TPP- | TPP- | TPP- | TPP- | TPP- |
|---|---|---|---|---|---|---|
| | 23411 | 29368 | 29369 | 27478 | 27479 | 9809 |
| EC50 | 227 | 326 | 102 | 151 | 79.5 | NA |
| (pM) | | | | | | |
| Max | 13.7 | 15.0 | 13.3 | 10.9 | 9.8 | 6.7 |
| Response | | | | | | |
| (%) | | | | | | |
| R² | 0.97 | 0.97 | 0.96 | 0.93 | 0.95 | NA |

### Example 10.3.4.2: ADCP Induction Mediated by Anti-Murine CCR8 Antibodies (Surrogate Antibodies)

[1924] To compare the behavior of the inventive human anti-human/cyno CCR8 antibodies with the inventive human anti-murine CCR8 surrogate antibodies, the latter were likewise characterized for ADCP induction.

[1925] For the functional ADCP assay primary murine bone marrow derived M2 macrophages were used as effector cells and murine CCR8 expressing HEK293 cells and BW 5417.3 cells (data not shown) as target cells. To generate the effector cells, murine bone marrow derived macrophages were plated into 24-well plate and polarized into M2 macrophages by addition of 20 ng/ml M-CSF, 0.05 μg/ml IL-4 and 0.05 μg/ml IL-13. Target cells were labeled with carboxyfluorescein succinimidyl ester dye (CFSE, ThermoFisher) and were added to effector cells in effector to target ratio of 2:1. Finally, surrogate anti-murine CCR8 antibody TPP-15285 and isotype control TPP-10748 were added in various concentrations. After 2 hours of coculturing cells were stained for murine M2 macrophage marker F4/80 and % of phagocytosis was determined using flow cytometry measuring the fraction of F4/80+ and CFSE+ double positive macrophages. 92% to 97% of target cells showed expression of murine CCR8 (as determined by FACS). Phagocytosis induced by TPP-15285 was ˜11% and the mean EC50 was ˜402 pM (Table 10.3.4.2.1). The highest antibody concentration resulted in a hook effect, further supporting the suggested mode of action. The optimized functional ADCP assay further confirmed that ADCP is a relevant mode of action for the in vivo efficacy of the inventive surrogate CCR8 antibodies and thus confirm the suitability of anti-murine CCR8 antibody TPP-15285 as surrogate antibody for the anti-human CCR8 antibodies.

TABLE 10.3.4.2.1
ADCP assay summary using fucosylated (wild type) surrogate
CCR8 antibodies.

| | TPP-15285 | TPP-10748 |
|---|---|---|
| EC50 (pM) | 402 | NA |
| Max Response (%) | 11 | 5 |
| R² | 0.93 | NA |

TABLE 10.3.4.2.2
ADCP assay using surrogate CCR8 antibodies.

| ng/ml | TPP-15285 | | TPP-10748 | |
|---|---|---|---|---|
| 10000 | 9 | 9.28 | 4.26 | 4.47 |
| 1000 | 10.33 | 11.61 | 4.96 | 4.12 |
| 100 | 8.3 | 8.79 | 4.93 | 5.61 |
| 10 | 4.99 | 4.49 | 3.6 | 4.12 |
| 1 | 4.34 | 4.28 | 3.59 | 4.54 |

### Example 10.4: Modulation of CCR8 Signaling by CCR8 Antibodies

[1926] CCL1 is a specific ligand of CCR8. Upon binding to CCR8, CCL1 can induce calcium (Ca) flux, chemotaxis, and—via β-arrestin signaling—receptor internalization, the latter being possibly independent of G protein signaling. There are at least 6 different ways an antibody can modulate a GPCR:
[1927] 1. An inverse agonist, upon binding, quiets the potential endogenous activation of the GPCR. For CCR8 the endogenous activation can be e.g. ˜10%.
[1928] 2. An antagonist biased to β-arrestin or G-protein blocks either G-protein dependent signaling or β-arrestin signaling and has no effect on the respective other pathway.
[1929] 3. A neutral antagonist can block both G-protein and β-arrestin signaling pathways.
[1930] 4. A full agonist activates both G-protein and β-arrestin signaling pathways.
[1931] 5. An agonist biased to β-arrestin or G-protein activates either G-protein signaling or β-arrestin signaling pathways, but not both.
[1932] 6. A dimerization promoting agonist crosslinks two GPCRs, e.g. with the different arms of the antibody, resulting in various signaling activities

[1933] For an ADCC and ADCP based approach for depleting intra-tumoral Tregs, it would be ideal to exclude any potential signaling effects that an antibody can have on CCR8. To assess this, the inventors used Ca flux assay as a readout for G-protein dependent signaling, and β-arrestin activation and phospho signaling as a readout for G-protein independent signaling pathways. Phospho Erk1/2 is involved in the MAP kinase pathway and regulates a variety of cellular responses, while phospho AKT is well known to be associated with the PI3 kinase pathway and has been shown in CCR8 to be involved in promoting chemotaxis. AKT pathway is also involved in promoting cell survival and growth, and recently, CCL1 has been shown to promote survival of CCR8 expressing cells (Barsheshet, Yiftah, et al. “CCR8+ FOXp3+ Treg cells as master drivers of immune regulation.” Proceedings of the National Academy of Sciences 114.23 (2017): 6086-6091).

### Example 10.4.1: DiscoverX Assay for Monitoring of β-Arrestin Signaling

[1934] In response to a stimulus, i.e. the binding of a ligand—such as CCL1 for CCR8—GPCRs can activate G-protein independent signaling, such as β-arrestin signaling. This can result in the internalization of the chemokine receptor (Fox, James M., et al. “Structure/Function Relationships of CCR8 Agonists and Antagonists. Amino-terminal extension of CCL1 by a single amino acid generates a partial agonist.” Journal of Biological Chemistry 281.48 (2006): 36652-36661). The β-arrestin assay was purchased from DiscoverX. In brief, CCR8 is fused in frame with a small enzyme donor fragment ProLink™ (PK) and co-expressed in cells stably expressing a fusion protein of β-arrestin and the larger, N-terminal deletion mutant of β-galactosidase (called enzyme acceptor or EA). Activation of CCR8 stimulates binding of β-arrestin to the PK-tagged CCR8 and forces complementation of the two enzyme fragments, resulting in the formation of an active β-galactosidase enzyme. This interaction leads to an increase in enzyme activity that can be measured using chemiluminescent PathHunter Detection Reagents.

[1935] In a first experiment, antibody or CCL1 was incubated with the CHO cells co-expressing human CCR8 tagged with ProLink and EA for 90 min before adding detection agent. Neither the prior art antibodies nor the inventive antibodies induced β-arrestin signaling (FIG. 25).

[1936] In a next experiment, the cells were stimulated with CCL1 at EC80 to activate β-arrestin signaling, and inventive antibodies or prior art antibodies were added to evaluate their ability to block activated β-arrestin signaling. Surprisingly, β-arrestin signaling was blocked by both prior art antibodies L263G8 and 433H, while inventive antibody TP-23411 showed no significant effect on β-arrestin signaling, at least up to a concentration of 100 nM (FIG. 26).

TABLE 10.4.1.1
IC50 values for inhibition of CCL1 induced ß-arrestin signaling of
TPP-23411 and prior art antibodies L263G8 and 433H measured in
nM. Staining was performed on CHO cells stably expressing human
CCR8 tagged with ProLink. No IC50 could be determined for the
inventive antibody, suggesting that TPP-23411 does not block CCL1
induced ß-arrestin signaling.

| | TPP-23411 | L263G8 | 433H |
|---|---|---|---|
| CHO with hCCR8: IC50 in nM | N/A | 13.84 | 0.78 |

### Example 10.4.2: Phospho ELISA

[1937] Phospho AKT signaling promotes survival and growth, while phospho Erk1/2 signaling regulates a variety of cellular responses. Phospho Erk1/2 and phospho AKT antibodies were purchased from CellSignaling and ELISA assays were performed according to the manufacturers protocol. CHO cells expressing human CCR8 or activated human Tregs were treated with CCL1, TPP-23411, Biolegend L263G8 or BD antibody 433H, or remained untreated for the negative control. CCL1 served as positive control. Interestingly, prior art antibodies Biolegend L263G8 and BD antibody 433H both induced a significant increase of phosphorylated Erk1/2 levels (FIG. 27, 28) as well as phosphorylated AKT levels (FIG. 29, 30), e.g. after 15 minutes in activated human Tregs, while this was not the case for inventive antibodies.

[1938] In summary, both prior art antibodies are agonistic for G protein independent pathways, such as AKT phosphorylation or ERK1/2 phosphorylation.

### Example 10.4.3: Calcium Flux Assay

[1939] Measurement of intracellular calcium mobilization is a robust assay that can be performed in a high-throughput manner to study the effect of compounds or antibodies on potential drug targets such as CCR8. To this end, the activity of receptors that signal through release of Ca2+ can be monitored using the fluorescence-based FLIPR calcium assay (Molecular Devices, Sunnyvale, Calif.). In brief, CHO cells expressing human CCR8 were seeded into assay plates and incubated overnight. Cells were then loaded with Ca+ sensitive dye BUV396/496.

[1940] For the measurement of antagonistic function, monitoring of Ca flux signal via FLIPR Tera started in parallel to the addition of antibodies or reference compound (MC148) at different concentrations to the cells. After 1 min incubation of the cells with the antibodies or reference compound, CCL1 agonist was added and calcium flux signal was recorded for an additional 3 min via FLIPR Tetra. To measure agonistic function, antibodies/reference compound were added in parallel to monitoring Ca flux signal via FLIPR for 3 min.

[1941] Tables 10.4.3.1 to 10.4.3.4 show results of the calcium flux assay for anti-murine or anti-human CCR8 antibodies. No IC50 could be determined for TPP-14099 and TPP-21047. IC50 for further inventive antibodies varied. In general, majority of inventive antibodies and also the prior art antibodies efficiently blocked CCL1 induced G protein dependent signaling.

TABLE 10.4.3.1
Ca Flux assay. CHO cells expressing murine CCR8 were used to test
the ability of the antibodies to block CCL1 induced G-protein dependent
Ca signaling. CCL1 at 40 ng/ml was used for induction. Both TPP-14095
and TPP-14099 bind to mouse CCR8. No agonistic effect on G-protein
dependent Ca signaling was observed for the inventive antibodies or the
prior art antibodies (data not shown).
Ca Flux Assay using CHO cells expressing murine CCR8

| | TPP-14095 | TPP-14099 |
|---|---|---|
| IC50 (nM) | 1.65 | N/A |

TABLE 10.4.3.2
Ca Flux assay. CHO cells expressing human CCR8 were used to test the
ability of the antibodies to block CCL1 induced G-protein dependent Ca
signaling. CCL1 was used at a concentration of 80 ng/ml.

| | | | TPP- | | TPP- |
|---|---|---|---|---|---|
| | TPP-9809 | TPP-18205 | 18206 | TPP-17577 | 17578 |
| IC50 (nM) | N/A | 1.6 | 3 | 93.8 | 4.53 |

TABLE 10.4.3.3
Ca Flux assay. CHO cells expressing human CCR8 were used to test
the ability of the antibodies to block CCL1 induced G-protein
dependent Ca signaling. CCL1 was used at a concentration of 60 ng/ml.

| | | | | TPP- | TPP- |
|---|---|---|---|---|---|
| | TPP-9809 | TPP-20955 | TPP-21045 | 21047 | 21360 |
| IC50 (nM) | N/A | 0.52 | 0.29 | N/A | 0.50 |

TABLE 10.4.3.4
Ca Flux assay. CHO cells expressing human CCR8 were used to test the ability
of the antibodies to block CCL1 induced G-protein dependent Ca signaling.
CCL1 was used at a concentration of 60 ng/ml.

| | | | TPP- | TPP- | | |
|---|---|---|---|---|---|---|
| | TPP-9809 | TPP-20955 | 21360 | 23411 | 443H | L263G8 |
| Hill Slope | ~−1.815e+046 | ~−0.03928 | −2.208 | −0.8122 | −1.048 | −0.6795 |
| IC50 (nM) | N/A | ~1.02e−025 | 0.417 | 1.22 | 1.3 | 1.26 |
| Span ratio (from | ~93.49 | ~11357 | 433.9 | 400.1 | 995.9 | 921.2 |
| max to min) | | | | | | |

### Example 10.5: Internalization of Inventive Antibodies

[1942] In order to evaluate internalization of CCR8, imaging technology was used to visualize this process. Specific anti-CCR8 antibodies TPP-21360 and TPP-23411 and the corresponding isotype control antibody TPP-5657 were labelled with a fluorescent dye. Additionally, commercial antibodies L263G8 and 433H as well as the murine antibody SA214G2 were also conjugated to the permanent dye BODIPY. These antibodies were lysine-conjugated with a two to six molar excess of BODIPY® FL dye (ester, D2184, ThermoFisher) at pH 8.3. After the conjugation, the reaction mixture was purified by chromatography (PD10 desalting column 1-2.5 ml; GE Healthcare) to eliminate excess dye and to adjust the pH-value. Afterwards, the protein solution was concentrated (VIVASPIN 500, Fa. Sartorius stedim biotec). Determination of the dye load of the antibody was carried out with a spectrophotometer (NanoDrop) and calculated with the formula D:P=A_{dye} εₚᵣₒₜₑᵢₙ: (A₂₈₀-0,16A_{dye}) ε_{dye}. The dye load of target-specific antibodies TPP-21360 and TPP-23411 and of the isotype control antibody were shown to be in a similar range (dye load/ab: 4.0 and 4.1). The commercial antibodies elicit dye load/antibody of 3.8 and 3.9. Conjugation might elicit a negative impact on antibody affinity thus testing of conjugated antibodies in a cell binding-assay (FACS) is essential to ensure that the labelling did not alter the binding to CCR8 (CD198) (cf. FIG. 31a, FIG. 32a, FIG. 34a, b). The conjugated antibodies were then ready to use for internalization assays performed with the human CCR8-positive cell line HuT78 and the murine CCR8-positive cell line BW5147.3. Prior to treatment, the CCR8-expressing cell lines (2×10⁴/well) were seeded in 100 μl medium in a 96-MTP (CellCarrier Ultra, PerkinElmer). After 18 h incubation at 37° C./5% CO₂, medium was changed and labelled antibody was added in various concentrations (2.5, 1 μg/ml; triplicates). The same treatment protocol was applied for the labelled isotype control antibody (negative control). Furthermore, the parental CHO-K1 cell line (CCR8 negative cells) was treated alike serving as counter screen (specificity control). The internalization study with the target-specific antibodies was performed in a kinetic fashion. Images were taken after different time points (0 h, 0.5 h, 2 h, 6 h and 24 h) and internalization efficacy was determined by measuring total internalized fluorescence intensity/cell. The measurement was performed using the Operetta CLS (PerkinElmer) and the data analyses of images were performed with the Harmony high-content analysis software (PerkinElmer).

[1943] FIGS. 31b and 32b show a substantial internalization of the commercial anti-human CCR8 antibodies 433H and L263G8 in HuT78 cells and commercial anti-murine CCR8 antibody SA214G2 in BW5147.3 cells, while FIG. 33 demonstrates a low or no internalization of the inventive antibodies TPP-21360 and TPP-23411, which is substantially comparable to the isotype control.

TABLE 10.5.1
Summary of internalization data for inventive antibodies and prior art
antibodies.

| | FACS | Internal- | FACS | |
|---|---|---|---|---|
| | HuT78 | ization | mBW5147.3 | Internalization |
| antibody | [MFI] | [fold isotype] | [MFI] | [fold isotype] |
| TPP-23411 | 600 | 0 | n.a. | n.a. |
| TPP-21360 | 600 | 0 | n.a. | n.a. |
| 433H | 50 | 22 | n.a. | n.a. |
| L263G8 | 40 | 22 | n.a. | n.a. |
| SA214G2 | n.a. | n.a. | 48 | 11 |
| (murine) | | | | |

n.a: not tested.

[1944] To confirm that the low internalization was indeed a feature characterizing all inventive anti-CCR8 antibodies obtained with a sulfated peptide antigen as described herein, the inventive antibodies listed in Table 10.5.2 (see also FIG. 89) were analyzed with respect to their internalization behavior with vesicle area/cell as readout. An anti-CD71 antibody with known substantial internalization was used as positive control. Indeed, all tested inventive anti-human CCR8 antibodies were non-internalizing antibodies, i.e. antibodies showing no substantial degree of internalization. Interestingly, TPP-17577, the only tested human anti human anti-CCR8 antibody without histidine within the HCDR3 showed a somewhat higher internalization than all tested human anti human anti-CCR8 antibody comprising histidine within the HCDR3.

TABLE 10.5.2
Summary of internalization data for inventive antibodies.

| | | Internalization |
|---|---|---|
| | Internalization HuT78 | HUVEC |
| TPP-17577 | n.a. | none |
| TPP-17578 | n.a. | none |
| TPP-18205 | n.a. | none |
| TPP-18206 | n.a. | none |
| TPP-20955 | none | none |
| TPP-21047 | none | none |
| TPP-23411 | none | none |
| TPP-27495 | none | none |
| TPP-27496 | none | none |
| TPP-18429 | none | none |
| TPP-18430 | none | none |
| TPP-18432 | n.a. | none |
| TPP-18433 | n.a. | none |
| TPP-18436 | none | none |
| TPP-19571 | n.a. | none |
| TPP-27478 | none | none |
| TPP-27477 | none | n.a. |
| TPP-27479 | none | none |
| TPP-27480 | none | none |

n.a: not tested.

### Example 10.6.1: FcRn Affinity Chromatography of Anti-CCR8 Antibodies

[1945] The neonatal Fc receptor (FcRn) is linked to the regulation of metabolic processing of IgG antibodies in vivo. Binding to FcRn in acidic environment of endosomes of vascular endothelial cells protects IgGs from lysosomal degradation. Release of IgGs from FcRn into the blood stream occurs at physiological pH 7.4. Thus, FcRn binds to IgGs at pH<6.5 and has no binding at physiological pH 7.4 Interaction between IgGs and FcRn has an impact on the pharmacokinetics of IgGs in vivo. Characterization of pH dependent IgG binding to FcRn by mimicking the antibody recycling interaction via immobilized FcRn can reveal IgG properties that contribute to their pharmacokinetics.

[1946] FcRn affinity runs were performed on an Äkta Pure 25 chromatography system at 25° C. A FcRn column (Roche, Order No. 8128057001; prepacked with approximately 1 mL resin; binding capacity: ≥100 μg IgG) was equilibrated with running buffer A: 20 mM MES/HCl pH 5.5 140 mM NaCl. 30 μL of each antibody (1 mg/mL in equilibration buffer) was applied to the column. Linear pH gradient was generated via increasing the percent of running buffer B 20 mM Tris/HCl pH 8.8 140 mM NaCl as followed: 0 min—20% B, 10 min—20% B, 80 min—100% B, 90 min—100% B, 93 min—20% B, 103 min—20% B. Flow rate was 0.5 mL/min. pH value at point of elution was monitored and read from chromatograms generated with Unicorn 7.1.

[1947] As can be seen from Table 10.6.1.1, prior art antibody Ustekinumab served as control for standard pharmacokinetics and prior art antibody Briakinumab served as a control for rapid pharmacokinetics (cf. Schoch, Angela, et al. “Charge-mediated influence of the antibody variable domain on FcRn-dependent pharmacokinetics.” Proceedings of the National Academy of Sciences 112.19 (2015): 5997-6002). TPP-17577, TPP-18205, TPP-27495, TPP-21047 and TPP-27496 show an elution pH greater than pH 7.5 and can be considered to show binding to FcRn also at pH 7.4 to pH 7.5. The measured pH may be used to predict the clearance and half-life of an antibody.

TABLE 10.6.1.1
FcRn affinity chromatography for different antibodies: pH at elution.
Two pH values indicate a double peak.

| TPP Nr. | pH at Elution |
|---|---|
| Ustekinumab | 7.22 |
| 27478 | 7.25 |
| 27477 | 7.25 |
| 19571 | 7.25 |
| 23411 | 7.38 |
| 20955 | 7.38 |
| 18436 | 7.38 |
| 18432 | 7.38 |
| 27479 | 7.43 |
| 23480 | 7.5 |
| 18433 | 7.5 |
| 18430 | 7.5 |
| 18429 | 7.5 |
| 18206 | 7.5 |
| 17578 | 7.5 |
| 17577 | 7.50/7.69 |
| 18205 | 7.50/7.77 |
| Briakinumab | 7.85 |
| 27495 | 7.88 |
| 21047 | 8 |
| 27496 | 8.13 |

### Example 10.6.2: FcRn Binding Analysis Based on SPR

[1948] To assess the binding affinity of anti-CCR8 antibodies to FcRn, the binding was investigated using SPR at pH 6.0 and pH 7.4. Binding assays were performed on a Biacore T200 instrument at 25° C. with a CM5 sensor chip and assay buffer PBST. For FcRn binding assays, human, mouse or cynomolgus FcRn were amine-coupled to the CM5 sensor chip surface (˜300 RU) and IgGs were injected at concentrations ranging from 15.6-2.000 nM in PBST, pH 6. Regeneration was performed with PBST pH 7.4. In another experiment at pH 7.4 only, IgGs were tested with one concentration of 2 μM, thus it was only qualitatively assessed if a binding occurs. KD values were derived from a steady state affinity analysis as well as from kinetic analysis by fitting to a 1:1 binding isotherm.

[1949] As can be seen from Table 10.6.2.1, and as discussed before, Ustekinumab served as positive control and Briakinumab as negative control as published in Schoch et al, 2015. These two antibodies do not significantly differ in their affinity to FcRn, but in their binding response to FcRn at pH 7.4. Thus, it can be assumed that antibodies showing a binding response at pH 7.4 might have an accelerated half-life in vivo.

### Example 10.7: Heparin Affinity Chromatography of Anti-CCR8 Antibodies

[1950] For the inventive antibodies recognizing human CCR8, charge-mediated interaction is highly likely, because the antibodies recognize a charged antigen tyrosine motif and have a certain structural composition, e.g. with regards to their HCDR3. Charge mediated interactions are however a driving force to degradation of IgGs besides FcRn binding at pH 7.4. Binding to a negatively charged glycocalyx of monocytes or macrophages may lead to pinocytosis and subsequent proteolytic degradation. Kraft et al. showed that antibody behavior in vivo can be predicted more efficiently and accurately when conducting heparine affinity chromatography together with FcRn chromatography (Kraft, Thomas E., et al. “Heparin chromatography as an in vitro predictor for antibody clearance rate through pinocytosis.” MAbs. Vol. 12. No. 1. Taylor & Francis, 2020).

TABLE 10.6.2.1
SPR analysis of affinities of inventive antibodies for different FCRN receptors. Small binding response is defined
as a response < 30 RU, binding response as >30 RU.

| | | Binding at | Binding at | | Binding | Binding at | | Binding at | |
|---|---|---|---|---|---|---|---|---|---|
| | Ligand: | pH 6.0 | pH 7.4 | Ligand: | at pH 6.0 | pH 7.4 | Ligand: | pH 6.0 | Binding at pH 7.4 [KD |
| Antibody | FcRn | [KD in M] | [KD in M] | FcRn | [KD in M] | [KD in M] | FcRn | [KD in M] | in M] |
| TPP-27496 | human | 1.4E−08 | binding response | cyno | 8.9E−09 | binding response | mouse | 1.6E−08 | binding response |
| TPP-27495 | human | 2.9E−08 | binding response | cyno | 3.0E−08 | binding response | mouse | 3.3E−08 | binding response |
| TPP-27480 | human | 6.1E−08 | binding response | cyno | 6.2E−08 | binding response | mouse | 1.2E−07 | binding response |
| TPP-27479 | human | 8.3E−08 | binding response | cyno | 9.0E−08 | binding response | mouse | 5.0E−08 | binding response |
| TPP-27478 | human | 9.7E07 | No response | cyno | 8.5E−07 | No response | mouse | 1.3E−07 | No response |
| TPP-27477 | human | 1.1E−06 | small/no binding | cyno | 1.0E−06 | small/no binding | mouse | 1.7E−07 | small/no binding |
| | | | response | | | response | | | response |
| Ustekinumab | human | 2.0E−07 | No response | cyno | 2.6E−07 | No response | mouse | 7.1E−08 | small binding response |
| Briakinumab | human | 2.3E−07 | binding response | cyno | 1.6E−07 | binding response | mouse | 5.6E−07 | binding response |
| TPP-21047 | human | 6.5E−08 | small binding response | cyno | 4.0E−08 | small binding response | mouse | 1.7E−07 | small binding response |
| TPP-18436 | human | 5.7E−08 | binding response | cyno | 5.3E−08 | binding response | mouse | 3.3E−08 | binding response |
| TPP-18433 | human | 5.8E−08 | binding response | cyno | 5.4E−08 | binding response | mouse | 4.2E−08 | binding response |
| TPP-18432 | human | 8.0E−08 | binding response | cyno | 8.5E−08 | binding response | mouse | 2.7E−08 | binding response |
| TPP-18430 | human | 7.4E−08 | binding response | cyno | 6.9E−08 | binding response | mouse | 5.2E−08 | binding response |
| TPP-18429 | human | 8.1E−08 | binding response | cyno | 7.6E−08 | binding response | mouse | 6.1E−08 | binding response |
| TPP-18205 | human | 9.6E−08 | No response | cyno | 7.9E−08 | No response | mouse | 1.0E−07 | No response |
| TPP-17577 | human | 5.5E−08 | binding response | cyno | 6.6E−08 | binding response | mouse | 4.3E−08 | binding response |
| TPP-18206 | human | 1.4E−07 | binding response | cyno | 2.7E−07 | binding response | mouse | 2.1E−07 | binding response |
| TPP-17578 | human | 1.0E−07 | small binding response | cyno | 1.3E−07 | small binding response | mouse | 3.8E−08 | small binding response |
| TPP-20955 | human | 5.4E−08 | small binding response | cyno | 4.0E−08 | small binding response | mouse | 5.8E−08 | small binding response |
| TPP-23411 | human | 5.1E−08 | small binding response | cyno | 7.0E−08 | small binding response | mouse | | |
| TPP-9809 | human | 1.4E−07 | No response | cyno | 4.0E−07 | No response | mouse | 2.8E−08 | No response |
| TPP-9809 | human | 1.6E−07 | No response | cyno | 4.1E−07 | No response | mouse | 3.9E−08 | No response |
| TPP-19571 | human | 1.3E−06 | small binding response | cyno | 1.2E−06 | small binding response | mouse | 1.9E−07 | binding response |

[1951] High affinitiy, high level of interaction and therefore high retention times may predict a shorter half-life of the tested antibodies. Heparine affinity runs were performed on an Akta Pure 25 chromatography system at 25° C. A heparane column (Tosoh) was equilibrated with running buffer A: 50 mM TRIS, pH 7.4. 50 μL of each antibody (1 mg/mL in 20 mM Histidin pH 5.5) was applied to the column. A linear salt gradient was generated by increasing the percent of running buffer B 20 mM Tris pH 7.4 1M NaCl as followed: 2 min post injection—0% B, 0-55% B over 16.5 minutes, 100% over 0.5 minutes, 100% B for four minutes. Flow rate was 0.8 mL/min. Time of elution was monitored and read from chromatograms generated with Unicorn 7.1.

[1952] As can be seen from Table 10.7.1, and as discussed before, Ustekinumab served as positive control and Briakinumab as negative control. Most tested inventive antibodies center around a retention time of 15 to 18 min. Thus, these antibodies might show a reduced half-life if electrostatic interactions contribute in vivo.

TABLE 10.7.1
Heparine affinity chromatography for different antibodies: pH at elution.

| TPP-Nr. | Retention time (minutes) |
|---|---|
| Ustekinumab | 11.95 |
| TPP-17578 | 13.53 |
| TPP-23411 (afuco) | 15.02 |
| TPP-27478 | 15.05 |
| TPP-27495 | 15.29 |
| TPP-19571 | 15.29 |
| TPP-27496 | 15.34 |
| TPP-27477 | 15.35 |
| Briakinumab | 15.78 |
| TPP-23411 (wt) | 15.86 |
| TPP-18205 | 16.02 |
| TPP-21047 | 16.06 |
| TPP-27480 | 16.09 |
| TPP-18436 | 16.21 |
| TPP-20955 | 16.73 |
| TPP-18432 | 17.01 |
| TPP-18206 | 17.24 |
| TPP-18206 | 17.51 |
| TPP-18430 | 17.54 |
| TPP-18429 | 17.54 |
| TPP-18433 | 17.56 |
| TPP-17577 | 18.06 |

### Example 10.8: Tox Studies and CCR8-Depletion in Macaca fascicularis

[1953] Macaca fascicularis were treated with, 50 mg/kg of TPP-23411 for four weeks. The animals showed no signs of toxicity. One week after last treatment thymus tissue (which has the highest levels of CCR8 among healthy tissues) was analyzed using RNA-seq. CCR8 mRNA level were found to be significantly reduced in the animals treated with anti-CCR8 antibody. No significant reduction in CCR8 levels were found at lower doses of TPP-23411.

| | | Mean log2 | SD log2 | T-test p-value |
|---|---|---|---|---|
| | | CCR8 | CCR8 | compared |
| | N | expression | expression | to isotype |
| Isotype | 2 | 7.386 | 0.128 | — |
| TPP-23411 | 2 | 5.459 | 0.346 | 0.0537 |

### Example 11: Therapeutic Applicability of the Target

[1954] For therapeutic use of a certain target in immune oncology, the specific expression of a target is of utmost importance for minimizing systemic side effects. The target shall be specific for the target tissue or cells, e.g. for intra-tumoral Tregs and shall not be expressed on healthy tissues. Furthermore, increased expression of the target in a certain tumor tissue may point towards the medical use for that indication. For example, CCR8 is also expressed on B cell lymphoma and T cell lymphoma tumor cell lines. Systemic removal of Treg cells may evoke and enhance not only tumor immunity, but also autoimmunity as evidenced by patients suffering from Immune dysregulation-polyendocrinopathy-enteropathy-X-linked (IPEX) syndrome. In this disease, patients lack Tregs due to a genetic alteration and die within the first 2 years of life due to systemic autoimmunity if not treated with appropriate immunosuppression. The high specificity of a target aimed at removal or suppression of intra-tumoral Tregs is thus assumed to be very important to avoid side effects of a therapeutic antibody, such as those observed for CCR4 targeting antibodies.

### Example 11.1: Specificity of the Target CCR8

[1955] In a first analysis, the inventors evaluated the expression of CCR8 mRNA in different human tissues and cell types. Significant expression of CCR8 mRNA was only observed in activated regulatory T cells, as well as tumor infiltrating lymphocytes (FIG. 35).

[1956] In a second analysis, the inventors evaluated the CCR8 mRNA expression in 50 different tumor indications. Indications with highest CCR8 expression are e.g. breast cancer, lung adenocarcinoma (ADC), testis cancer, stomach cancer and squamous cell carcinoma (SCC), head and neck malignancies as well as esophageal tumors, but high expression was also found in colorectal cancer, ovarian cancer and cervical cancer. In all indications except pancreatic adenocarcinoma and melanoma, expression was found to be higher in the tumor compared to the corresponding normal tissue (FIG. 36).

[1957] In a third analysis, the inventors evaluated the co-expression of CCR8 mRNA with FOXP3 mRNA in various tumor indications. Co-expression with Treg marker FOXP3 is important to demonstrate that CCR8 is indeed mainly expressed on Tregs, cf. Table 11.1.1. IHC stainings confirmed these findings, see FIG. 37.

TABLE 11.1.1
CCR8 and the regulatory T cell defining marker FOXP3 are
the most closely correlated genes across all 9588 TCGA tumor
samples (excluding Thymoma as indication) pointing towards
these genes being co-expressed in the same cell type. The table
shows the 25 genes (out of 35021 genes) most strongly correlated
with CCR8 and FOXP3 mRNA expression levels and their
respective Pearson correlation coefficients, r.

| CCR8 | | FOXP3 | |
|---|---|---|---|
| CCR8 | 1.000 | FOXP3 | 1.000 |
| FOXP3 | 0.828 | CCR8 | 0.828 |
| ICOS | 0.814 | ICOS | 0.821 |
| CCR4 | 0.813 | TIGIT | 0.804 |
| TIGIT | 0.762 | CTLA4 | 0.766 |
| P2RY10 | 0.760 | SIRPG | 0.747 |
| CD80 | 0.748 | SLAMF1 | 0.741 |
| TNFRSF9 | 0.746 | CCR4 | 0.737 |
| CD3G | 0.741 | IL2RB | 0.737 |
| SLAMF1 | 0.726 | CD5 | 0.733 |
| IL7R | 0.724 | P2RY10 | 0.727 |
| IL2RB | 0.716 | CD3G | 0.724 |
| CTLA4 | 0.715 | TNFRSF9 | 0.723 |
| CD5 | 0.713 | CXCL9 | 0.721 |
| ITK | 0.713 | CD2 | 0.720 |
| IL2RA | 0.711 | GBP5 | 0.718 |
| LAX1 | 0.707 | UBASH3A | 0.714 |
| IKZF3 | 0.699 | CD3E | 0.713 |
| GBP5 | 0.699 | CXCR6 | 0.713 |
| CXCR6 | 0.693 | CXCR3 | 0.712 |
| SIRPG | 0.690 | LTA | 0.712 |
| CD2 | 0.689 | CD80 | 0.710 |
| CSF2RB | 0.688 | CD6 | 0.708 |
| SLAMF7 | 0.683 | ITK | 0.706 |
| CXCL9 | 0.681 | CXCL13 | 0.704 |

[1958] In addition, the correlation of CCR8 mRNA with pan-T cell marker CD3, cytotoxic T cell marker CD8, macrophage marker MS4A7, general inflammation marker IFNg, and B cell markers CD19, CD20, CD22 was evaluated for 50 tumor indications, cf. Table 11.1.2. Interestingly, for nearly all indications, the correlation was highly significant, suggesting increased expression of CCR8 upon immune cell infiltration into the tumor per se, and T reg infiltration in particular. From this it can be expected that immune cell infiltration and in particular T cell infiltration are likewise valuable biomarkers for patient stratification to identify patients which are more likely to profit from anti-CCR8 therapy.

TABLE 11.1.2
Pearson correlation coefficients, r, between log2 mRNA levels of CCR8 and Treg marker
FOXP3, pan-T cell marker CD3, cytotoxic T cell marker CD8, macrophage marker MS4A7, general
inflammation marker IFNg, or B cell markers CD19, CD20, CD22. Results suggest a highly significant
co-expression of CCR8 with immune cell and in particular T reg infiltration into tumors across 48 out of
50 indications from TCGA. It can therefore be expected that e.g. T cell infiltration constitutes a valuable
stratification biomarker for identifying patients likely profiting from anti-CCR8 therapy.

| | | | | pan T cells | | cytotoxic T | | | |
|---|---|---|---|---|---|---|---|---|---|
| | | regulatory T cells | | (CD3E + CD3D + | | cells (CD8A + | | | |
| | | (FOXP3) | | CD3G) | | CD8B) | | | |
| Indication | N | r | pv | r | pv | r | | pv | |
| Head and Neck cancer-Oral | 79 | 0.916 | 1.87E−83 | 0.791 | 1.22E−45 | 0.661 | | 2.51E−27 | |
| cancer-SCC | | | | | | | | | |
| Breast cancer-ADC-Ductal- | 150 | 0.641 | 1.70E−09 | 0.584 | 8.82E−08 | 0.448 | | 8.80E−05 | |
| TPBC | | | | | | | | | |
| Head and Neck cancer-Laryngeal | 276 | 0.928 | 1.51E−36 | 0.717 | 2.42E−14 | 0.576 | | 1.20E−08 | |
| cancer-SCC | | | | | | | | | |
| Lung cancer-NSCLC-ADC- | 132 | 0.90 | 3.77E−40 | 0.763 | 9.07E−22 | 0.580 | | 4.79E−11 | |
| Mixed | | | | | | | | | |
| Breast cancer-ADC-Ductal- | 197 | 0.870 | 1.30E−31 | 0.729 | 1.13E−17 | 0.602 | | 4.20E−11 | |
| TNBC | | | | | | | | | |
| Gastric cancer-ADC | 165 | 0.853 | 2.87E−45 | 0.747 | 4.64E−29 | 0.677 | | 3.04E−22 | |
| Lung cancer-NSCLC-ADC | 134 | 0.829 | 4.51E−82 | 0.689 | 2.92E−46 | 0.486 | | 2.83E−20 | |
| Gastric cancer-ADC-Intestinal | 198 | 0.726 | 1.65E−13 | 0.684 | 1.40E−11 | 0.596 | | 1.70E−08 | |
| Gastric cancer-ADC-Diffuse | 63 | 0.825 | 2.90E−18 | 0.665 | 4.52E−10 | 0.597 | | 6.23E−08 | |
| Testicular cancer-Germ cell | 619 | 0.328 | 4.35E−03 | 0.367 | 1.32E−03 | 0.255 | | 2.85E−02 | |
| tumor-Seminoma | | | | | | | | | |
| Lung cancer-NSCLC-SCC | 99 | 0.895 | 2.21E−168 | 0.775 | 1.43E−96 | 0.589 | | 6.11E−46 | |
| Thymoma | 71 | 0.351 | 8.31E−05 | 0.372 | 2.81E−05 | 0.357 | | 6.14E−05 | |
| Esophageal cancer-ADC | 177 | 0.909 | 9.69E−35 | 0.780 | 2.17E−19 | 0.697 | | 3.21E−14 | |
| Breast cancer-ADC-Ductal | 336 | 0.783 | 4.02E−129 | 0.675 | 1.58E−83 | 0.570 | | 1.28E−54 | |
| Gastric cancer-ADC-Intestinal- | 89 | 0.895 | 1.11E−27 | 0.812 | 5.44E−19 | 0.594 | | 1.57E−08 | |
| Tubular | | | | | | | | | |
| Breast cancer-ADC-Lobular | 96 | 0.848 | 3.26E−50 | 0.730 | 9.15E−31 | 0.642 | | 5.98E−22 | |
| Pancreatic cancer-ADC-Ductal | 156 | 0.864 | 5.89E−45 | 0.697 | 1.14E−22 | 0.621 | | 4.96E−17 | |
| Colorectal cancer-ADC | 69 | 0.902 | 7.12E−124 | 0.703 | 2.54E−51 | 0.513 | | 6.34E−24 | |
| Esophageal cancer-SCC | 75 | 0.832 | 7.93E−26 | 0.653 | 5.31E−13 | 0.578 | | 7.03E−10 | |
| Head and Neck cancer-SCC | 76 | 0.836 | 7.80E−53 | 0.548 | 7.42E−17 | 0.435 | | 1.68E−10 | |
| Breast cancer-ADC | 83 | 0.781 | 4.14E−14 | 0.687 | 5.12E−10 | 0.549 | | 3.20E−06 | |
| Uterine cancer-Cervical-SCC- | 207 | 0.809 | 1.19E−27 | 0.536 | 7.66E−10 | 0.368 | | 5.71E−05 | |
| Non-keratinizing | | | | | | | | | |
| Uterine cancer-Cervical-SCC- | 197 | 0.853 | 1.29E−16 | 0.637 | 1.75E−07 | 0.595 | | 1.70E−06 | |
| Keratinizing | | | | | | | | | |
| Bladder cancer-Transitional cell | 534 | 0.828 | 7.54E−71 | 0.680 | 7.75E−39 | 0.501 | | 5.68E−19 | |
| carcinoma | | | | | | | | | |
| Ovarian cancer-ADC- | 66 | 0.545 | 4.22E−25 | 0.491 | 4.53E−20 | 0.381 | | 5.07E−12 | |
| Cystadenocarcinoma-Papillary | | | | | | | | | |
| serous | | | | | | | | | |
| Uterine cancer-Cervical-SCC | 127 | 0.804 | 3.16E−20 | 0.681 | 1.02E−12 | 0.644 | | 3.76E−11 | |
| Kidney cancer-ccRCC | 77 | 0.835 | 5.60E−140 | 0.655 | 8.13E−67 | 0.553 | | 4.86E−44 | |
| Skin cancer-Melanoma | 86 | 0.797 | 5.44E−105 | 0.798 | 1.66E− | 0.721 | | 7.80E−77 | |
| | | | | | 105 | | | | |
| Thyroid cancer-Papillary | 356 | 0.829 | 3.81E−93 | 0.610 | 2.53E−38 | 0.365 | | 7.48E−13 | |
| carcinoma-Classical variant | | | | | | | | | |
| Mesothelioma-Epithelioid | 319 | 0.843 | 1.98E−16 | 0.760 | 7.00E−12 | 0.691 | | 2.65E−09 | |
| Sarcoma-Malignant fibrous | 108 | 0.828 | 6.76E−14 | 0.621 | 1.15E−06 | 0.569 | | 1.31E−05 | |
| histiocytoma | | | | | | | | | |
| Prostate cancer-ADC-Acinar | 477 | 0.773 | 7.89E−97 | 0.708 | 1.88E−74 | 0.559 | | 5.85E−41 | |
| type | | | | | | | | | |
| Bladder cancer-Transitional cell | 57 | 0.889 | 6.39E−46 | 0.743 | 1.97E−24 | 0.662 | | 5.43E−18 | |
| carcinoma-Papillary | | | | | | | | | |
| Uterine cancer-Endometrial- | 307 | 0.686 | 2.58E−16 | 0.498 | 4.11E−08 | 0.381 | | 4.82E−05 | |
| ADC-Endometrioid | | | | | | | | | |
| Uterine cancer-Endometrial- | 147 | 0.405 | 1.60E−03 | 0.381 | 3.15E−03 | 0.301 | | 2.17E−02 | |
| ADC-Papillary serous | | | | | | | | | |
| Sarcoma-Liposarcoma- | 482 | 0.799 | 5.61E−14 | 0.649 | 3.66E−08 | 0.560 | | 4.97E−06 | |
| Dedifferentiated | | | | | | | | | |
| Sarcoma-Leiomyosarcoma | 106 | 0.838 | 4.58E−29 | 0.754 | 1.04E−20 | 0.710 | | 1.53E−17 | |
| Liver cancer-HCC | 58 | 0.405 | 1.77E−15 | 0.674 | 1.52E−48 | 0.558 | | 1.64E−30 | |
| Thyroid cancer-Follicular | 51 | 0.398 | 3.47E−05 | 0.251 | 1.08E−02 | 0.041 | | 6.80E−01 | |
| carcinoma | | | | | | | | | |
| Brain cancer-Glioma- | 472 | 0.616 | 1.34E−18 | 0.612 | 2.31E−18 | 0.492 | | 1.86E−11 | |
| Astrocytoma-Glioblastoma | | | | | | | | | |
| Kidney cancer-Papillary-Type II | 74 | 0.755 | 4.86E−17 | 0.688 | 2.38E−13 | 0.648 | | 1.54E−11 | |
| Kidney cancer-Papillary | 120 | 0.858 | 4.77E−38 | 0.618 | 1.04E−14 | 0.618 | | 9.58E−15 | |
| Uterine cancer-Endometrial- | 102 | 0.716 | 3.73E−10 | 0.573 | 3.20E−06 | 0.378 | | 3.79E−03 | |
| Carcinosarcoma-Malignant mixed | | | | | | | | | |
| mullerian tumor | | | | | | | | | |
| Kidney cancer-Papillary-Type I | 363 | 0.781 | 5.15E−17 | 0.460 | 2.58E−05 | 0.482 | | 9.16E−06 | |
| Kidney cancer-Chromophobe | 84 | 0.227 | 6.63E−02 | 0.179 | 1.50E−01 | 0.177 | | 1.55E−01 | |
| Adrenal cancer-Adrenocortical | 55 | 0.176 | 1.21E−01 | 0.363 | 1.01E−03 | 0.333 | | 2.72E−03 | |
| carcinoma | | | | | | | | | |
| Adrenal cancer- | 114 | 0.455 | 4.92E−09 | 0.377 | 1.99E−06 | 0.340 | | 2.09E−05 | |
| Pheochromocytoma | | | | | | | | | |
| Brain cancer-Glioma- | 108 | 0.620 | 2.70E−22 | 0.54 | 2.29E−16 | 0.473 | | 2.32E−12 | |
| Astrocytoma | | | | | | | | | |
| Brain cancer-Glioma- | 58 | 0.479 | 4.70E−09 | 0.553 | 4.19E−12 | 0.427 | | 2.70E−07 | |
| Oligoastrocytoma | | | | | | | | | |
| Brain cancer-Glioma- | 57 | 0.217 | 2.11E−03 | 0.295 | 2.46E−05 | 0.236 | | 7.98E−04 | |
| Oligodendroglioma | | | | | | | | | |
| | | | | M2 | | | | b cells (CD19 + | |
| | | macrophages | | macrophages | | Inflammation | | MS4A1 + | |
| | | (MS4A7) | | (MRC1) | | (IFNg) | | CD22) | |
| Indication | N | r | pv | r | pv | r | pv | r | pv |
| Head and Neck cancer- | 79 | 0.742 | 1.62E− | 0.578 | 7.11E− | 0.505 | 8.98E− | 0.610 | 1.82E− |
| Oral cancer-SCC | | | 37 | | 20 | | 15 | | 22 |
| Breast cancer-ADC- | 150 | 0.107 | 3.75E− | 0.371 | 1.44E− | 0.552 | 5.92E− | 0.404 | 4.78E− |
| Ductal-TPBC | | | 01 | | 03 | | 07 | | 04 |
| Head and Neck cancer- | 276 | 0.740 | 1.40E− | 0.687 | 7.76E− | 0.317 | 3.52E− | 0.434 | 4.20E− |
| Laryngeal cancer-SCC | | | 15 | | 13 | | 03 | | 05 |
| Lung cancer-NSCLC- | 132 | 0.534 | 2.74E− | 0.623 | 5.84E− | 0.464 | 4.25E− | 0.520 | 7.74E− |
| ADC-Mixed | | | 09 | | 13 | | 07 | | 09 |
| Breast cancer-ADC- | 197 | 0.622 | 6.43E− | 0.607 | 2.82E− | 0.446 | 3.70E− | 0.563 | 1.30E− |
| Ductal-TNBC | | | 12 | | 11 | | 06 | | 09 |
| Gastric cancer-ADC | 165 | 0.675 | 4.00E− | 0.704 | 1.26E− | 0.629 | 1.52E− | 0.435 | 1.42E− |
| | | | 22 | | 24 | | 18 | | 08 |
| Lung cancer-NSCLC- | 134 | 0.594 | 7.28E− | 0.642 | 1.75E− | 0.415 | 1.03E− | 0.491 | 9.47E− |
| ADC | | | 32 | | 38 | | 14 | | 21 |
| Gastric cancer-ADC- | 198 | 0.531 | 9.78E− | 0.533 | 8.65E− | 0.436 | 9.37E− | 0.501 | 4.68E− |
| Intestinal | | | 07 | | 07 | | 05 | | 06 |
| Gastric cancer-ADC- | 63 | 0.684 | 9.45E− | 0.593 | 7.99E− | 0.403 | 5.93E− | 0.405 | 5.55E− |
| Diffuse | | | 11 | | 08 | | 04 | | 04 |
| Testicular cancer-Germ | 619 | 0.040 | 7.37E− | 0.429 | 1.35E− | 0.203 | 8.20E− | 0.035 | 7.67E− |
| cell tumor-Seminoma | | | 01 | | 04 | | 02 | | 01 |
| Lung cancer-NSCLC-SCC | 99 | 0.658 | 2.03E− | 0.633 | 8.10E− | 0.494 | 1.09E− | 0.574 | 4.27E− |
| | | | 60 | | 55 | | 30 | | 43 |
| Thymoma | 71 | 0.147 | 1.09E− | 0.039 | 6.69E− | 0.055 | 5.47E− | 0.228 | 1.23E− |
| | | | 01 | | 01 | | 01 | | 02 |
| Esophageal cancer-ADC | 177 | 0.713 | 4.46E− | 0.719 | 2.23E− | 0.598 | 5.98E− | 0.662 | 1.61E− |
| | | | 15 | | 15 | | 10 | | 12 |
| Breast cancer-ADC-Ductal | 336 | 0.232 | 5.09E− | 0.538 | 9.58E− | 0.606 | 3.17E− | 0.465 | 1.62E− |
| | | | 09 | | 48 | | 63 | | 34 |
| Gastric cancer-ADC- | 89 | 0.703 | 1.44E− | 0.743 | 1.50E− | 0.603 | 7.94E− | 0.596 | 1.38E− |
| Intestinal-Tubular | | | 12 | | 14 | | 09 | | 08 |
| Breast cancer-ADC- | 96 | 0.264 | 3.78E− | 0.483 | 9.41E− | 0.653 | 7.46E− | 0.495 | 2.60E− |
| Lobular | | | 04 | | 12 | | 23 | | 12 |
| Pancreatic cancer-ADC- | 156 | 0.757 | 1.55E− | 0.766 | 1.34E− | 0.389 | 1.13E− | 0.423 | 9.66E− |
| Ductal | | | 28 | | 29 | | 06 | | 08 |
| Colorectal cancer-ADC | 69 | 0.752 | 1.72E− | 0.770 | 2.78E− | 0.436 | 5.18E− | 0.479 | 1.09E− |
| | | | 62 | | 67 | | 17 | | 20 |
| Esophageal cancer-SCC | 75 | 0.678 | 3.14E− | 0.431 | 1.18E− | 0.550 | 6.51E− | 0.357 | 3.57E− |
| | | | 14 | | 05 | | 09 | | 04 |
| Head and Neck cancer- | 76 | 0.594 | 3.86E− | 0.516 | 8.40E− | 0.424 | 5.27E− | 0.381 | 3.41E− |
| SCC | | | 20 | | 15 | | 10 | | 08 |
| Breast cancer-ADC | 83 | 0.271 | 3.15E− | 0.505 | 2.41E− | 0.603 | 1.73E− | 0.468 | 1.11E− |
| | | | 02 | | 05 | | 07 | | 04 |
| Uterine cancer-Cervical- | 207 | 0.555 | 1.54E− | 0.527 | 1.71E− | 0.346 | 1.59E− | 0.559 | 9.91E− |
| SCC-Non-keratinizing | | | 10 | | 09 | | 04 | | 11 |
| Uterine cancer-Cervical- | 197 | 0.730 | 2.64E− | 0.498 | 1.10E− | 0.456 | 4.65E− | 0.591 | 2.03E− |
| SCC-Keratinizing | | | 10 | | 04 | | 04 | | 06 |
| Bladder cancer- | 534 | 0.509 | 1.36E− | 0.590 | 2.75E− | 0.427 | 1.14E− | 0.409 | 1.53E− |
| Transitional cell carcinoma | | | 19 | | 27 | | 13 | | 12 |
| Ovarian cancer-ADC- | 66 | 0.309 | 3.22E− | 0.293 | 1.64E− | 0.410 | 7.12E− | 0.139 | 1.49E− |
| Cystadenocarcinoma- | | | 08 | | 07 | | 14 | | 02 |
| Papillary serous | | | | | | | | | |
| Uterine cancer-Cervical- | 127 | 0.629 | 1.51E− | 0.577 | 9.49E− | 0.516 | 5.17E− | 0.645 | 3.57E− |
| SCC | | | 10 | | 09 | | 07 | | 11 |
| Kidney cancer-ccRCC | 77 | 0.520 | 2.71E− | 0.245 | 1.04E− | 0.577 | 8.41E− | 0.476 | 1.71E− |
| | | | 38 | | 08 | | 49 | | 31 |
| Skin cancer-Melanoma | 86 | 0.614 | 2.96E− | 0.639 | 1.74E− | 0.665 | 1.54E− | 0.653 | 9.36E− |
| | | | 50 | | 55 | | 61 | | 59 |
| Thyroid cancer-Papillary | 356 | 0.440 | 1.41E− | 0.649 | 7.94E− | 0.446 | 3.63E− | 0.365 | 7.05E− |
| carcinoma-Classical variant | | | 18 | | 45 | | 19 | | 13 |
| Mesothelioma-Epithelioid | 319 | 0.465 | 2.68E− | 0.317 | 1.64E− | 0.596 | 9.94E− | 0.364 | 5.35E− |
| | | | 04 | | 02 | | 07 | | 03 |
| Sarcoma-Malignant | 108 | 0.160 | 2.63E− | 0.125 | 3.84E− | 0.527 | 6.99E− | 0.524 | 8.03E− |
| fibrous histiocytoma | | | 01 | | 01 | | 05 | | 05 |
| Prostate cancer-ADC- | 477 | 0.594 | 3.24E− | 0.596 | 1.25E− | 0.528 | 7.01E− | 0.595 | 1.78E− |
| Acinar type | | | 47 | | 47 | | 36 | | 47 |
| Bladder cancer- | 57 | 0.607 | 1.14E− | 0.709 | 1.80E− | 0.586 | 1.57E− | 0.628 | 7.43E− |
| Transitional cell carcinoma- | | | 14 | | 21 | | 13 | | 16 |
| Papillary | | | | | | | | | |
| Uterine cancer- | 307 | 0.456 | 7.25E− | 0.422 | 5.28E− | 0.425 | 4.61E− | 0.402 | 1.59E− |
| Endometrial-ADC- | | | 07 | | 06 | | 06 | | 05 |
| Endometrioid | | | | | | | | | |
| Uterine cancer- | 147 | 0.369 | 4.36E− | 0.347 | 7.66E− | 0.122 | 3.61E− | 0.044 | 7.43E− |
| Endometrial-ADC-Papillary | | | 03 | | 03 | | 01 | | 0 |
| serous | | | | | | | | | |
| Sarcoma-Liposarcoma- | 482 | 0.206 | 1.21E− | 0.118 | 3.79E− | 0.482 | 1.26E− | 0.526 | 2.25E− |
| Dedifferentiated | | | 01 | | 01 | | 04 | | 05 |
| Sarcoma-Leiomyosarcoma | 106 | 0.569 | 1.97E− | 0.558 | 5.09E− | 0.674 | 2.30E− | 0.491 | 8.84E− |
| | | | 10 | | 10 | | 15 | | 08 |
| Liver cancer-HCC | 58 | 0.524 | 1.54E− | 0.263 | 5.06E− | 0.555 | 3.42E− | 0.575 | 1.09E− |
| | | | 26 | | 07 | | 30 | | 32 |
| Thyroid cancer-Follicular | 51 | 0.243 | 1.39E− | 0.334 | 5.99E− | 0.110 | 2.69E− | 0.171 | 8.61E− |
| carcinoma | | | 02 | | 04 | | 01 | | 02 |
| Brain cancer-Glioma- | 472 | 0.418 | 2.23E− | 0.402 | 8.97E− | 0.365 | 1.44E− | 0.312 | 4.52E− |
| Astrocytoma-Glioblastoma | | | 08 | | 08 | | 06 | | 05 |
| Kidney cancer-Papillary- | 74 | 0.443 | 1.91E− | 0.510 | 5.24E− | 0.575 | 6.83E− | 0.451 | 1.33E− |
| Type II | | | 05 | | 07 | | 09 | | 05 |
| Kidney cancer-Papillary | 120 | 0.457 | 6.48E− | 0.492 | 4.23E− | 0.651 | 1.13E− | 0.512 | 7.97E− |
| | | | 08 | | 09 | | 16 | | 10 |
| Uterine cancer- | 102 | 0.370 | 4.58E− | 0.213 | 1.12E− | 0.519 | 3.49E− | 0.277 | 3.69E− |
| Endometrial- | | | 03 | | 01 | | 05 | | 02 |
| Carcinosarcoma-Malignant | | | | | | | | | |
| mixed mullerian tumor | | | | | | | | | |
| Kidney cancer-Papillary- | 363 | 0.206 | 7.19E− | 0.252 | 2.70E− | 0.609 | 4.04E− | 0.527 | 8.67E− |
| Type I | | | 02 | | 02 | | 09 | | 07 |
| Kidney cancer- | 84 | 0.326 | 7.52E− | 0.262 | 3.36E− | 0.246 | 4.68E− | 0.165 | 1.86E− |
| Chromophobe | | | 03 | | 02 | | 02 | | 01 |
| Adrenal cancer- | 55 | 0.394 | 3.32E− | 0.327 | 3.24E− | 0.273 | 1.48E− | 0.084 | 4.59E− |
| Adrenocortical carcinoma | | | 04 | | 03 | | 02 | | 01 |
| Adrenal cancer- | 114 | 0.221 | 6.66E− | 0.225 | 5.71E− | 0.315 | 8.80E− | 0.191 | 1.94E− |
| Pheochromocytoma | | | 03 | | 03 | | 05 | | 02 |
| Brain cancer-Glioma- | 108 | 0.348 | 5.53E− | 0.023 | 7.48E− | 0.543 | 1.57E− | 0.502 | 6.07E− |
| Astrocytoma | | | 07 | | 01 | | 16 | | 14 |
| Brain cancer-Glioma- | 58 | 0.212 | 1.40E− | 0.133 | 1.26E− | 0.627 | 5.05E− | 0.214 | 1.30E− |
| Oligoastrocytoma | | | 02 | | 01 | | 16 | | 02 |
| Brain cancer-Glioma- | 57 | 0.148 | 3.77E− | 0.029 | 6.82E− | 0.338 | 1.07E− | 0.097 | 1.76E− |
| Oligodendroglioma | | | 02 | | 01 | | 06 | | 01 |

### Example 11.2: Specificity of CCR8 for Intra-Tumoral Tregs Compared with T Effector Cells

[1959] There are several issues to consider with regards to Treg depletion for cancer immunotherapy in humans. Treg and activated effector T cells most often share the expression of the same types of cell surface molecules, including CD25 and CTLA-4, making it difficult to selectively deplete Tregs without also affecting effector T cells by antibodies specific for these molecules.

[1960] Foxp3+CD25+CD4+ Treg cells in tumors (tumor infiltrating or intra-tumoral Tregs) express higher levels of cell surface molecules associated with T-cell activation, such as CD25, CTLA-4, PD-1, LAG3, TIGIT, ICOS, and TNF receptor super family members including 4-1BB, OX-40, and GITR, compared with Tregs in lymphoid or non-lymphoid tissues or the blood. In addition, tumor infiltrating Tregs express high levels of specific chemokine receptors including CCR4 and CCR8.

[1961] CD4+CD25+ sorted and unsorted PBMCs were activated with anti-CD3 and anti-CD28 beads+IL2 for 6 days. FACS analysis showed CCR8 protein expression preferentially on stimulated Tregs (CD4+CD25+FoxP3+ CD127dim), see FIG. 38. Alternative targets OX40, GITR, and CD25 but not CCR8 are significantly expressed on stimulated CD8+ Teff cells and CD4+ T cells (CD4+CD25+Foxp3−). CCR4 shows rather Treg specific expression but no intratumor T reg specificity. These findings are consistent with the observation that CCR4 antibodies have shown immunological side effects, which have been attributed to the systemic depletion of Tregs. In terms of specificity, CCR8 seems to be superior to support the specific depletion of intra-tumoral Tregs.

[1962] To confirm the findings, raw data for NSCLC, CRC and liver cancer patients were retrieved from Guo, Xinyi, et al. “Global characterization of T cells in non-small-cell lung cancer by single-cell sequencing.” Nature medicine 24.7 (2018): 978-985, Zhang, Yuanyuan, et al. “Deep single-cell RNA sequencing data of individual T cells from treatment-naïve colorectal cancer patients.” Scientific data 6.1(2019): 1-15, and Zheng, Chunhong, et al. “Landscape of infiltrating T cells in liver cancer revealed by single-cell sequencing.” Cell 169.7 (2017): 1342-1356, respectively and used for analysis of CCR8 specificity, see FIG. 39. Indeed, for these tumors, CCR8 mRNA expression is largely restricted to regulatory T cells (light grey boxes) residing in tumor tissue while largely being absent in regulatory T cells from normal tissues as well as from CD4 helper T and CD8 cytotoxic T cells (medium and dark gray boxes, respectively). FACS analysis of human tumor lysate samples confirmed that CCR8 protein is specifically expressed on human tumor-infiltrating Tregs in non-small-cell lung cancer (NSCLC), colorectal carcinoma (CRC), renal cell carcinoma (RCC) and lymph nodes (LNs, data not shown), FIG. 40. Up to 90% of tumor-infiltrated Tregs are CCR8 positive, e.g. in NSCLC, 40-90% in stage III+ and 40-70% in stage I/II, in CRC 20-40% in stage III+, and in RCC 40-50% in stage III+. Based on these data, stratification according to staging is assumed to lead to a further benefit for patients treated with an anti-CCR8 antibody.

### Example 12: In Vivo Experiments

### Example 12.1.1: Surrogate Antibodies & Syngeneic Tumor Models

[1963] In mouse experiments surrogate antibodies binding to mouse-CCR8 were used to demonstrate anti-tumor efficacy and to characterize the mode-of-action, namely Treg depletion within the tumor depending on ADCC (antibody-dependent cellular cytotoxicity) and ADCP (antibody-dependent cellular phagocytosis) potency.

TABLE 12.1.1.1
List of surrogate anti-mouse CCR8 antibodies used for in vivo studies.
ADCC was determined using HEK293 cells overexpressing murine
CCR8 as target cells and NK92 cells as effector cells.
ADCC activity is measured by lactate dehydrogenase (LDH) release.

| Anti-CCR8 antibody | Isotype | ADCC potency in vitro |
|---|---|---|
| TPP-14095 | Human IgG1 | Not determined |
| TPP-14099 | | EC50: 3.14 nM |
| TPP-18208_aglyco | | EC50: >98 nM |
| TPP-18209_aglyco | | Not determined |
| TPP-15285 | Mouse IgG2a | EC50: 0.5 nM |
| TPP-15286 | | Not determined |
| TPP-9809 | Human IgG1 | Non-binding isotype control |
| TPP-10748 | Mouse IgG2a | Non-binding isotype control |
| TPP-15726 | Human IgG1 | Aglycosylated isotype control |

[1964] Anti-murine CCR8 antibody TPP-14099 binds CHO cells expressing murine CCR8 with an EC50 of 3 nM and murine iTregs with an EC50 of 13.2 nM, as determined by FACS (data not shown).

[1965] Different syngeneic tumor models were used to model tumors with a high degree of immune infiltration as well as tumors with a low degree of immune cell infiltration. Furthermore, the used models deviate in their responses to treatment with known checkpoint-inhibitors, e.g. treatment with anti-CTLA4, anti-PD1 or anti-PD-L1 antibodies. An overview of tested tumor models with the efficacy data for the respective inventive anti-CCR8 antibody is shown in Table 12.1.1.2. Remarkably, efficacy was demonstrated in various syngeneic tumor models.

[1966] In brief, a suspension containing usually 500.000-1.000.000 tumor cells per 100 μl PBS, medium or a mixture of 50% Matrigel was subcutaneously injected into the flank of female immunocompetent mice (e.g. Balb/c, C57B16). At palpable tumor sizes of about 60-100 mm³ (usually 100 mm³) CCR8-antibody administration started by intraperitoneal injection of typically 10 mg/kg in a volume of 5-10 ml/kg. In dose-titration studies lower doses were tested. Non-binding antibodies of the respective isotype served as control. Groups comprised n=10 mice. Therapy was applied twice per week, typically as a q3/4d schedule, and tumor size and body weight were measured three times per week. Tumor growth data are plotted as mean volume over time.

[1967] Tumor and tissue samples were taken from identically treated satellite animals (n=5 per group) 24 hours after the second antibody treatment and were analyzed by flow cytometry after dissociation into single cells and lysis of erythrocytes with particular focus on changes in absolute numbers of regulatory T cells (Tregs) per 100 mg tissue. Used markers for determining activated Tregs were CD45+CD4+CD25+FoxP3+. Other FACS markers comprised CD8, NKp46, 4-1BB, F4/80, CD11c, Gr1 and MHCII.

TABLE 12.1.1.2
Overview of different tumor models with parameters to characterize treatment outcome.
Efficacy was measured by Treg depletion, Overall Response Rate and
Tumor-to-Control ratio based on final tumor
volumes of anti-CCR8 surrogate antibodies in syngeneic mouse tumor models.

| | TPP | Treg depletion | CD8+ T cell/ | | |
|---|---|---|---|---|---|
| Model | (10 mg/kg) | (%)¹ | Treg ratio | ORR² (% CRs) | T/C vol³ |
| CT26⁴ | 14099 | 78.3 | 56 | 58 (30) | 0.15 |
| H22 | | n.d. | n.d. | 0 (0) | 0.30 |
| 4T1 | | n.d. | n.d. | 20 (0) | 0.42 |
| Hepa1-6 | | n.d. | n.d. | 10 (0) | 0.45 |
| C38 | | 45.5 | 17 | 4.5 (0) | 0.55 |
| MC38 | | n.d. | n.d. | 0 (0) | 0.78 |
| LL/c | | n.d. | n.d. | 0 (0) | 0.85 |
| MBT2 | | n.d. | n.d. | 10 (10) | 0.86 |
| RM-1 | | n.d. | n.d. | 0 (0) | 0.99 |
| B16B16 | | n.d. | n.d. | 0 (0) | 1.06 |
| CT264 | 15285 | 82.3 | 64 | 72 (30) | 0.18 |
| EMT-6 | | 61.6 | 3 | 90 (0) | 0.28 |
| F9 | | 73.2 | 54 | 60 (30) | 0.21 |
| C38 | | 68.2 | 16 | 40 (30) | 0.23 |
| B16F10-OVA | | 59.0 | 77 | 0 (0) | 0.37 |
| A20 | | 28.0 | 3 | 40 (30) | 0.46 |
| 4T1 | | 37.1 | 1 | 0 (0) | 0.90 |
| B16F10 | | 7.5 | 3 | 0 (0) | 0.95 |
| EG7-ova | | n.d. | n.d. | 0 (0) | 0.86 |
| PANCO2 | | n.d. | n.d. | 10 (0) | 0.51 |
| MBT2 | | n.d. | n.d. | 30 (20) | 0.40 |
| MC38 | | n.d. | n.d. | 30 (0) | 0.35 |
| MC38 | | n.d. | n.d. | 0 (0) | 0.58 |
| J558 | | n.d. | n.d. | 0 (0) | 0.89 |
| RENCA | | n.d. | n.d. | 0 (0) | 0.81 |
| Colon26 | | n.d. | n.d. | 0 (0) | 0.50 |
| KLN205 | | n.d. | n.d. | 0 (0) | 0.79 |

¹Treg depletion was calculated as percent difference between the intra-tumoral Tregs in the isotype control and the intra-tumoral Tregs in tumors treated with the therapeutic antibody.
²Overall response rate (ORR) and Complete response (CR) are based on an adaption of the RECIST criteria to the fast tumor growth in a mouse model (CR: complete responder (<10% of initial tumor volume); PR: partial responder (max 300% of initial tumor volume); NR: non-responder (>300% of initial tumor volume)).
³T/C refers to treatment tumor volume/control tumor volume at study end. n.d .: not determined.
⁴Averages of several studies in this tumor model.

[1968] For each syngeneic mouse tumor model, 10 tumors in both the isotype control group as well as the anti-CCR8 treatment group were harvested at the end of the treatment cycle, 24 h after last treatment (bi-weekly treatment until tumors in either group reached an average volume of 3000 mm³) and genome wide mRNA expression was measured via RNA-seq. Of 17 models assessed via RNA-seq 13 models showed elevated CD8 mRNA levels in the anti-CCR8 treatment group compared to the control group with fold changes as shown in Table 12.1.1.3. For models CT26, H22, RM1, MBT2, and Hepa1-6 the increase in CD8 levels was significant according to a T-test statistic indicating significant increases in cytotoxic T cells infiltration at end of the treatment cycle. These data strongly suggest that the CD8+ cells were involved in effecting the tumor response.

TABLE 12.1.1.3
Changes in CD8 mRNA levels induced by anti-CCR8 treatment.

| Model | Fold change | T test p-value |
|---|---|---|
| CT26 | 8.604 | 8.7E−08 |
| H22 | 7.160 | 1.7E−09 |
| RM1 | 3.105 | 3.1E−03 |
| MBT2 | 2.716 | 1.3E−09 |
| WEHI-164 | 1.680 | 1.4E−01 |
| Hepa1-6 | 1.621 | 2.7E−02 |
| LL2 | 1.315 | 1.3E−01 |
| PANC02 | 1.242 | 5.4E−01 |
| KLN205 | 1.194 | 5.2E−01 |
| RENCA | 1.188 | 6.7E−01 |
| Colon26 | 1.137 | 7.6E−01 |
| B16BL6 | 1.022 | 9.3E−01 |
| J558 | 0.924 | 8.6E−01 |
| MC38 | 0.898 | 6.2E−01 |
| 4T1 | 0.499 | 8.8E−02 |
| EG7-OVA | 0.449 | 4.3E−02 |

### Example 12.1.2: Syngeneic Model Characterization for Biomarker Identification

[1969] Based on genome wide RNA-seq data of early tumors from the syngeneic models, increased levels of the following genes were found to strongly correlate with tumor response: Eif3j2, Eno1b, Ifi441, Hist1 h2al, Ifi202b, Hmga1b, Amd2, Sycp1, It1n1, Trim34b, Catsperg2, Zfp868, Serpina1b, Prss41, C1rb, Cyld, Ccnblip1, Masp2, Acaa1b, C4a, Snord93, Abhd1, Serpina3 h, H2-K2, Cd1d2, Hal, Rnf151, Rbm46, Arg2, Mir8099-2, Igsf21, Olfr373, C1s2, Crym, Arv1, Hddc3, Plppr4, Ppp1r11, Rps3a2, Zfp459, Rnd1, Serpina1a, Vcpkmt, Atp10d, Gbp2b, H2-T24, Tlcd2, Ctse, H2-Q10, Cyp2c55, Borcs8, Tpsab1, Trim43b, Cc2d1a, Serpina1d, Cacna1a, Kcnj14, Ttc13, Farsa, Olfr1217, Jam1, H2-B1, Tnpo2, Rims3, Dock9, Car5b, Atp1a4, H2-Q1, Zfp69, Slpi, Pcdhgb8, Ocel1, Selenbp2, Nsd3, Wt1, Nap112, Ranbp9, Gtpbp3, AY761185, Rnaset2a, Serpina3i, E112, Gal3st2b, Urb2, F12, Klk1, Ifi214, Cstl1, Agtpbp1, Msh5, Cox18, Zfp330, Ttc37, Klk4, H2-Q5, Cxcl11, Rab39, Pm20d1, Nod2, H2-DMb2. Interestingly, this set is highly enriched for early complement factors, complement regulating factors such as Serpins, and MHC components. These markers or a combination thereof may be used for stratification or to predict or monitor tumor response. In particular, the presence of high levels of Complement C1/C4 might contribute to Treg lysis. Where depletion/consumption of complement factors reduces the efficacy of Treg depletion, supplementing the complement system, e.g. in a combination treatment may be an option.

[1970] The different syngeneic models were further characterized with regards to absolute numbers of immune cell subsets and frequency within total CD45+ immune cells in the tumors. For the models analyzed via flow cytometry (Table 12.1.2.1), B16F10 is characterized by the lowest number of immune cells—and showed the least reduction in tumor volume, cf. Table 12.1.2.1. Thus, immune cell infiltration may be used for stratification to predict response to treatment with CCR8 antibodies. This hypothesis could later be confirmed using B16B16.

TABLE 12.1.2.1
Characterization of tumor microenvironment by absolute numbers of immune
cell subsets and frequency within total CD45+ immune cells in the tumors of
the vehicle group analyzed at an early time-point (24 hours after the second
treatment). T/C vol describes the ratio of tumor volume of the CCR8-antibody
treated group (10 mg/kg twice weekly) versus control group at the end of the study.
Absolute immune cell numbers

| | T/C | | | CD4+ | | | |
|---|---|---|---|---|---|---|---|
| Model | vol | CD45+ | CD8+ | conv | Treg | NK cells | Mph |
| CT26 | 0.18 | 1368322 | 192436 | 74946 | 66189 | 271952 | 54108 |
| F9 | 0.21 | 535626 | 19741 | 21068 | 13965 | 50021 | 33206 |
| EMT-6 | 0.28 | 1178255 | 9201 | 26504 | 18767 | 10016 | 290251 |
| B16F10- | 0.37 | 388299 | 80015 | 26337 | 9948 | 68771 | 33597 |
| OVA | | | | | | | |
| 4T1 | 0.42 | 399181 | 17992 | 11636 | 32076 | 16386 | 52023 |
| A20 | 0.46 | 548792 | 144609 | 77894 | 80907 | 26629 | 85936 |
| C38 | 0.55 | 525455 | 176380 | 57803 | 37518 | 36523 | 17514 |
| B16F10 | 0.95 | 57459 | 2633 | 3269 | 653 | 6558 | 20057 |

Relative immune cell numbers

| | | | % CD4+ | | | |
|---|---|---|---|---|---|---|
| | T/C | % CD8+ | conv of | % Treg | % NK cells | % Mph of |
| Model | vol¹ | of CD45+ | CD45+ | of CD45+ | of CD45+ | CD45+ |
| CT26 | 0.18 | 14.1 | 5.5 | 4.8 | 19.9 | 4.0 |
| F9 | 0.21 | 3.7 | 3.9 | 2.6 | 9.3 | 6.2 |
| EMT-6 | 0.28 | 0.8 | 2.2 | 1.6 | 0.9 | 24.6 |
| B16F10- | 0.37 | 20.6 | 6.8 | 2.6 | 17.7 | 8.7 |
| OVA | | | | | | |
| 4T1 | 0.42 | 4.5 | 2.9 | 8.0 | 4.1 | 13.0 |
| A20 | 0.46 | 26.4 | 14.2 | 14.7 | 4.9 | 15.7 |
| C38 | 0.55 | 33.6 | 11.0 | 7.1 | 7.0 | 3.3 |
| B16F10 | 0.95 | 4.6 | 5.7 | 1.1 | 11.4 | 34.9 |

### Example 12.2: Efficacy in CT26-Tumor Bearing Mice

[1971] Treatment with anti-CCR8 antibodies TPP-15285 and TPP-15286 showed strong anti-tumor efficacy in CT26 tumor bearing mice (FIG. 41). TPP-15285 showed reduced efficacy at the lowest dose of 0.1 mg/kg, other dose-dependent differences were not significant. As expected, an anti-PD-L1 antibody (“PDL1”) demonstrated medium efficacy in the model. Non-binding antibodies of the respective isotypes did not show any efficacy.

[1972] Spider plots (tumor growth of individual mice over time) of the corresponding treatment groups (FIG. 42) clearly demonstrated homogenously strong efficacy with complete responses occurring in all dose-groups with both anti-CCR8 antibodies.

[1973] Treg analysis of CT26 tumor samples 24 hours after the second antibody treatment by flow cytometry showed strongly reduced numbers of Tregs in the anti-CCR8 antibody treated group versus the isotype control group. Treg depletion was clearly dose-dependent in case of TPP-15285 (FIG. 43).

TABLE 12.2.1
Corresponding data from FIG. 43.

| | Mean | % Tregs | Mean # | % CD8+ T | Ratio | Ratio |
|---|---|---|---|---|---|---|
| | # | relative | CD8+ T | cells relative | CD8+ T | CD4+ conv |
| CT26 | Tregs | to iso ctrl | cells | to iso ctrl | cells: Tregs | cells: Tregs |
| mIgG2a Iso | 162741 | 100 | 437223 | 100 | 3 | 1 |
| TPP-15285, 10 mg/kg | 20872 | 13 | 1239497 | 283 | 64 | 9 |
| TPP-15285, 1 mg/kg | 53303 | 33 | 716253 | 164 | 16 | 4 |
| TPP-15285, 0.1 mg/kg | 76360 | 47 | 684058 | 156 | 10 | 2 |
| TPP-15286, 10 mg/kg | 16321 | 10 | 624631 | 143 | 44 | 7 |
| TPP-15286, 1 mg/kg | 14349 | 9 | 765654 | 175 | 87 | 11 |
| TPP-15286, 0.1 mg/kg | 23202 | 14 | 1421674 | 325 | 68 | 11 |
| mIgG1 iso | 87365 | 100 | 326799 | 100 | 4 | 1 |
| anti-PDL1, 10 mg/kg | 107029 | 123 | 313229 | 96 | 3 | 1 |

### Example 12.3: Mode of Action Studies

### Example 12.3.1: ADCC/ADCP Mode of Action Studies in CT26-Tumor Bearing Mice

[1974] Aglycosylated antibodies, which can be produced in prokaryotic hosts show almost identical antigen-binding affinity, stability at a physiological temperature, and in vivo serum persistence compared with glycosylated counterparts. However, the absence of N-linked glycans abrogates nearly all FcγR-binding affinity and immune effector functions that are essential for clearing antibody-opsonized target cells via ADCC or ADCP. To provide evidence for the ADCC/ADCP based mode of action, aglycosylated versions of the antibodies were generated as a negative control.

[1975] TPP-18208 and TPP-18209 are aglycosylated human IgG1 versions of anti-CCR8 surrogate antibodies and are unable to bind effector cells, such as NK cells and/or macrophages, via Fc-gamma-receptors. These antibodies were tested for anti-tumor efficacy in CT26 tumor bearing mice and were compared with the respective wild-type/glycosylated counterparts comprising the same sequence (TPP-14095, TPP-14099). In addition, anti-CCR8 antibodies TPP-15285 and TPP-15286 (glycosylated, mIgG2 isotype) were included in the study.

[1976] The wild-type antibodies showed a strong anti-tumor efficacy, while the aglycosylated antibodies did not show any efficacy compared to the isotype control (FIG. 44). Spider plots illustrate the results for individual mice in each treatment group (FIG. 45). Accordingly, ex vivo tumor analysis by flow cytometry demonstrated Treg depletion only after treatment with the wild-type (glycosylated) antibodies whereas the aglycosylated antibodies showed no Treg depletion compared to the respective non-binding isotype control (FIG. 46).

[1977] These results confirmed ADCC and/or ADCP as predominant mode of action for Treg depletion by anti-CCR8 antibodies in CT26 tumors.

### Example 12.3.2: B Cell or T Cell Involvement and Impact of CD8+ Cell Depletion or CD19+ Cell Depletion on Anti-Tumor Efficacy of Anti-CCR8 Antibodies

[1978] To test the relevance of the presence of tumor infiltrating CD8+ T cells or CD19+ B cells on the anti-tumor efficacy of anti-CCR8 antibodies, the inventors used genetically modified C57BL6 mice expressing diphtheria toxin receptor (DTR) under the control of either the lineage specific Cd8a+ or the lineage specific Cd19+ promoter. Upon injection of diphtheria toxin (DT) CD8+ T cells or CD19+ B cells were quantitatively depleted from both the blood of the mice (data not shown) as well as from subcutaneously carried syngeneic MC38 tumors (Table 12.3.2.1).

[1979] As expected, depletion of CD8+ T cells completely abrogated the anti-tumor effect of anti-CCR8 treatment, resulting in tumor growth identical to that of the isotype control group (FIG. 87). These results confirmed the dependency of the anti-tumor efficacy of the inventive anti-CCR8 antibodies on the presence of CD8+ T cells.

[1980] In contrast, and very surprisingly, depleting CD19+ B cells significantly increased the efficacy of TPP15285 (FIG. 88), resulting in a reduction of the T/C ratio from 0.35 to 0.16 (T-test p-value=0.032). Combining anti-CCR8 treatment with B cell depletion or B cell depleting agents such as anti-CD19 antibodies or anti-CD20 antibodies such as Rituximab is therefore suggested to further improve the cancer treatment in the clinic.

TABLE 12.3.2.1
Depletion of CD8a and CD19 expression in diphtheria toxin treated DTR mice.

| | Mean log2 Cd8a | Mean log2 Cd19 |
|---|---|---|
| Treatment (N = 10 in each group) | (mRNA levels) | (mRNA levels) |
| DTR mice + Isotype [TPP-10748] | 6.919 | 1.333 |
| DTR mice + anti-CCR8 [TPP-15285, 10 mg/kg] | 7.380 | 2.002 |
| CD19-DTR + DT + Isotype | 7.466 | 0.406 |
| CD19-DTR + DT + anti-CCR8 [TPP-15285, 10 mg/kg] | 9.039 | 0.000 |
| CD8-DTR + DT + Isotype | 0.711 | 1.766 |
| CD8-DTR + DT + anti-CCR8 [TPP-15285, 10 mg/kg] | 2.736 | 1.592 |

TABLE 12.3.2.2
Treatment groups to evaluate influence of CD19+ B cell depletion or CD8+ T cell
depletion.

| | | | | | T/C | T/C |
|---|---|---|---|---|---|---|
| | | | | Dose | (CD8 | (CD19 |
| Group | Treatment | Dose | Route | scheme | depleted) | depleted) |
| 01a | Isotype control | 10 mg/kg | i.p. | BIW | 1 | 1 |
| 01b | Anti-CCR8 antibody TPP15285 | 10 mg/kg | i.p. | BIW | 0.58 | 0.35 |
| 02a | Isotype control | 10 mg/kg | i.p. | BIW | 1.39 | 0.75 |
| | with 0.015 mg/kg Diphtheria toxin | | | | | |
| 02b | Anti-CCR8 antibody TPP15285 | 10 mg/kg | i.p | BIW | 1.01 | 0.2 |
| | with 0.015 mg/kg Diphtheria toxin | | | | | |

### Example 12.3.3: Time Course of Increasing CD8/FOXP3 Ratios in CT26 Syngeneic Tumor Bearing Mice

[1981] To gain some mechanistic insights into the immune cell levels, mRNA levels of CD8 and FOXP3 were monitored in CT26 syngeneic tumor bearing mice treated with TPP15285 or isotype control. 10 tumors were harvested for RNA-seq analysis directly before administering the first dose as well as 12 h, 24 h, 36 h, 48 h, 72 h after the first dose was administered. Similarly, tumors were harvested 24 h after administration of a second, third and fourth dose of TPP15285. All tumors were subjected to RNA-seq analysis to measure murine Foxp3, CD8a, and CD8b1 mRNA levels. Ratios of mean Cd8a and Cd8b1 to Fopx3 ratios were computed and the significance of the differences in the ratios between the control and TPP15285 treated groups was computed via a T-test.

[1982] CD8 to FOXP3 mRNA ratios varied between a value of 0.9 and a value of around 2.0 in the isotype control and the earliest time points after TPP15285 treatment, but then significantly increased in the TPP15285 groups to values of 5.8, 3.9, and 4.4 at 72 h after 1st dose, 24 h after 2nd dose, and 24 h after 3rd dose, respectively, demonstrating significant depletion of regulatory T cells by TPP15285. Ratios fell back to a value of 2.6 at 24 h after the 4th dose was administered.

TABLE 12.3.3.1
CD8/FOXP3 ratio of mRNA levels measured at different time
points after administration of TPP15285 or isotype control.

| | TPP15285 | Isotype | |
|---|---|---|---|
| | CD8/FOXP3 | CD8/FOXP3 | T-test |
| Time point | ratio | ratio | p-value |
| Day 11, 0 h after 1st dose | 1.433 | 1.822 | 4.0E−01 |
| Day 11, 12 h after 1st dose | 0.900 | 1.468 | 1.7E−01 |
| Day 12, 24 h after 1st dose | 1.589 | 0.911 | 2.5E−01 |
| Day 12, 36 h after 1st dose | 1.965 | 1.012 | 1.3E−01 |
| Day 13, 48 h after 1st dose | 2.386 | 0.976 | 5.5E−03 |
| Day 14, 72 h after 1st dose | 5.755 | 1.721 | 4.3E−02 |
| Day 15, 24 h after 2nd dose | 3.882 | 2.028 | 9.4E−02 |
| Day 18, 24 h after 3rd dose | 4.424 | 1.727 | 3.7E−03 |
| Day 22, 24 h after 4th dose | 2.579 | 1.870 | 1.6E−01 |

### Example 12.4: Efficacy of CCR8-Antibody TPP-15285 in EMT6-Tumor Bearing Mice

### Example 12.4.1: Efficacy of CCR8-Antibody TPP-15285 in EMT6-Tumor Bearing Mice—Different Dosing

[1983] The anti-CCR8 surrogate antibody TPP-15285 showed dose-dependent efficacy in EMT6 tumor bearing mice with the strongest effect in the 10 mg/kg dose group. For this dose, TPP-15285 had a superior efficacy over anti-CTLA4 antibody (FIG. 47, FIG. 48). Strong efficacy was still observed in the 1 mg/kg dose group whereas the 0.1 and 0.01 mg/kg dose groups showed almost no efficacy. Spider plots illustrate these results on an individual mouse level (FIG. 49).

[1984] Treg analysis of EMT6-tumor samples 24 hours after the second antibody treatment by flow cytometry showed strongly reduced numbers of Tregs in the anti-CCR8 antibody treated versus the isotype control group. Treg depletion was clearly dose-dependent (FIG. 50). Treg depletion was also observed for anti-CTLA4, as previously described in literature. Additionally, a strong increase of CD8+ T cells in the tumors sampled at study end were demonstrated for the efficacious dose groups 10 mg/kg and 1 mg/kg of TPP-15285 as well as for anti-CTLA4 (FIG. 51). Further alterations of immune cell populations are shown in Table 12.4.1.1 and Table 12.4.1.2.

TABLE 12.4.1.1
Relative percentage of immune cell populations determined by FACS analysis of immune
cells 24 hours after second treatment of EMT6-tumor bearing mice with different doses
of CCR8-antibody TPP-15285, or at the end of the study.

| | | | TPP- | TPP- | TPP- | TPP- | | |
|---|---|---|---|---|---|---|---|---|
| | | | 15285, | 15285, | 15285 | 15285, | Ham | aCTLA4 |
| | | mIgG2a | 10 | 1 | 0.1 | 0.01 | IgG | 10 |
| | EMT6 | Iso | mg/kg | mg/kg | mg/kg | mg/kg | iso | mg/kg |
| FACS | Mean % CD45+ relative to iso | 100 | 94 | 76 | 93 | 102 | 100 | 87 |
| 24 h | Mean % CD4conv+ relative to iso | 100 | 91 | 120 | 121 | 155 | 100 | 52 |
| after | Mean % CD4+ relative to iso | 100 | 59 | 69 | 95 | 135 | 100 | 44 |
| 2nd | Mean % activated CD8+ relative | 100 | 52 | 93 | 70 | 105 | 100 | 47 |
| treat- | to iso | | | | | | | |
| ment | Mean % NK cells relative to iso | 100 | 95 | 104 | 135 | 134 | 100 | 82 |
| | Mean % CD8+ T cells relative | 100 | 61 | 99 | 90 | 113 | 100 | 48 |
| FACS | Mean % CD45+ relative to iso | 100 | 153 | 116 | 108 | 107 | 100 | 91 |
| at | Mean % CD4conv+ relative to iso | 100 | 245 | 169 | 115 | 112 | 100 | 262 |
| study | Mean % CD4+ relative to iso | 100 | 209 | 150 | 121 | 119 | 100 | 152 |
| end | Mean % activated CD8+ relative | 100 | 532 | 377 | 96 | 67 | 100 | 314 |
| | to iso | | | | | | | |
| | Mean % NK cells relative to iso | 100 | 310 | 179 | 100 | 86 | 100 | 158 |
| | Mean % CD8+ T cells relative | 100 | 529 | 406 | 119 | 88 | 100 | 309 |

TABLE 12.4.1.2
Relative percentage of Tregs, CD8:Treg ratio or CD4conv:Treg ratio determined by
FACS analysis of immune cells 24 hours after second treatment of EMT6-tumor bearing
mice with different doses of CCR8-antibody TPP-15285, or at the end of the study.

| | | | TPP- | TPP- | TPP- | TPP- | | |
|---|---|---|---|---|---|---|---|---|
| | | | 15285, | 15285, | 15285, | 15285, | Ham | aCTLA4 |
| | | mIgG2a | 10 | 1 | 0.1 | 0.01 | IgG | 10 |
| | EMT6 | Iso | mg/kg | mg/kg | mg/kg | mg/kg | isotype | mg/kg |
| FACS | Mean % Treg | 100 | 26 | 22 | 75 | 126 | 100 | 18 |
| analysis | relative to iso | | | | | | | |
| 24 h | CD8:Treg ratio | 1.1 | 3.2 | 4.8 | 1.4 | 0.9 | 1.2 | 4.1 |
| after | CD4conv:Treg | 0.9 | 3.6 | 4.6 | 1.4 | 1 | 1.6 | 5.8 |
| second | ratio | | | | | | | |
| treat- | | | | | | | | |
| ment | | | | | | | | |
| FACS | Mean % Treg | 100 | 160 | 125 | 122 | 122 | 100 | 86 |
| analysis | relative to iso | | | | | | | |
| at study | CD8:Treg ratio | 1.3 | 4.6 | 4.2 | 1.2 | 0.9 | 1.1 | 4.3 |
| end | CD4conv:Treg ratio | 1.2 | 1 | 0.6 | 0.7 | 0.6 | 1.7 | 1.7 |

### Example 12.4.2: Efficacy of CCR8-Antibody TPP-15285 in EMT6-Tumor Bearing Mice—Single or Multiple Dosing

[1985] Murine breast cancer model EMT-6 was used with TPP-15285 to test the impact of single vs. multiple dosing. Four different treatment schemes were tested: single treatment, two times BIW treatment, three times BIW treatment, or four times BIW treatment. Each group was treated with vehicle control or 0.1 mg/kg, 1 mg/kg, or 5 mg/kg of TPP-15285. In addition to the efficacy study, satellite animals were sacrificed for ex vivo phenotyping at 24 hr, 48 hr, and 120 hr after treatments. Antibody administration occurred i.p. but other routes can be used.

[1986] Efficacy data for single treatment, two times BIW treatment, three times BIW treatment, or four times BIW treatment are shown in FIG. 85. Interestingly, single dose treatment was suitable to obtain an excellent treatment efficacy. At the study end, there was an increase in frequency, absolute number and activation of CD8+ intra-tumoral T cells, cf. Table 12.4.2.1. However, at the study end there was no difference in intra-tumoral Treg number and frequency or CCR8 expression, cf. Table 12.4.2.2. In addition, there was no difference in intra-tumoral NK cells or macrophages cell number at the end of the study or during the study (data not shown).

[1987] However, in the time course, there was a dose-dependent reduction of intra-tumoral Tregs (CD4+CD25+Foxp3+) after 1st and 2nd treatments, but less pronounced after 3rd and 4th treatments, cf. Table 12.4.2.3. This was also observed in CCR8+ Tregs (data not shown). Furthermore, absolute numbers of CD8+ T cells increased over time, cf. Table 12.4.2.4. Accordingly, CD8 to Treg ratios increased post first dose and remained high until after the fourth dose compared to isotype controls. Characterization of blood samples did not show substantial decrease of Tregs or increase in CD8 T cells in the blood upon different treatment schedule and over time (data not shown). In addition, no change was observed in NK and macrophages in blood (data not shown).

TABLE 12.4.2.1
Absolute CD8+ cells per 100 mg tumor as determined by FACS at study end. FACS analysis
revealed increase of frequency, absolute number and activation status of Cytotoxic T cells.

| | Vehicle (PBS, | | | TPP-15285 | | | TPP-15285 | | | TPP-15285 | | |
|---|---|---|---|---|---|---|---|---|---|---|---|---|
| | four treatment) | | | 0.1 mg/kg | | | 1 mg/kg | | | 5 mg/kg | | |
| Treatment | Mean | SD | n | Mean | SD | n | Mean | SD | n | Mean | SD | n |
| single dose | 1802 | 1066 | 4 | 3793 | 1300 | 5 | 4435 | 2787 | 5 | 17995 | 1209 | 3 |
| 2 treatments | | | | 3661 | 1826 | 5 | 6609 | 3373 | 5 | 7752 | 5470 | 5 |
| 3 treatments | | | | 7800 | 8399 | 5 | 19189 | 21883 | 4 | 7358 | 4575 | 5 |
| 4 treatments | | | | 10569 | 8227 | 5 | 9099 | 3561 | 5 | 17604 | 10357 | 4 |

TABLE 12.4.2.2
Absolute CD4+ CD25+ FoxP3+ Treg cells per 100 mg tumor as
determined by FACS at study end.

| | Vehicle (PBS, | | | TPP-15285 | | | TPP-15285 | | | TPP-15285 | | |
|---|---|---|---|---|---|---|---|---|---|---|---|---|
| | four treatment) | | | 0.1 mg/kg | | | 1 mg/kg | | | 5 mg/kg | | |
| Treatment | Mean | SD | n | Mean | SD | n | Mean | SD | n | Mean | SD | n |
| single dose | 2751 | 1624 | 4 | 2976 | 1507 | 5 | 2190 | 892 | 5 | 9366 | 594 | 3 |
| 2 treatments | | | | 2686 | 1472 | 5 | 5011 | 3179 | 5 | 3413 | 1855 | 5 |
| 3 treatments | | | | 3187 | 2399 | 5 | 5517 | 5406 | 4 | 2214 | 1508 | 5 |
| 4 treatments | | | | 3041 | 1449 | 5 | 3349 | 1427 | 5 | 7745 | 6271 | 5 |

TABLE 12.4.2.3
Absolute CD4+ CD25+ FoxP3+ Treg cells per 100 mg tumor as determined by FACS
in satellite animals.

| Time | | | | | | | | | | | | |
|---|---|---|---|---|---|---|---|---|---|---|---|---|
| (after | | | | TPP-15285 | | | TPP-15285 | | | TPP-15285 | | |
| treatment | Vehicle | | | 0.1 mg/kg | | | 1 mg/kg | | | 5 mg/kg | | |
| no.) | Mean | SD | n | Mean | SD | n | Mean | SD | n | Mean | SD | n |
| 24 h (1) | 13013 | 2878 | 4 | 7526 | 4116 | 5 | 11395 | 9162 | 6 | 10149 | 8020 | 5 |
| 48 h (1) | 12187 | 8549 | 5 | 10241 | 3097 | 6 | 4521 | 2593 | 6 | 11149 | 14745 | 6 |
| 120 h (1) | 13764 | 6040 | 5 | 9884 | 5660 | 6 | 8975 | 3810 | 6 | 3008 | 2067 | 6 |
| 24 h (2) | 14315 | 11220 | 3 | 7836 | 5964 | 6 | 2893 | 1347 | 4 | 1951 | 1041 | 6 |
| 48 h (2) | 15022 | 7702 | 5 | 9377 | 5010 | 6 | 3478 | 2374 | 6 | 1540 | 1495 | 6 |
| 120 h (2) | 5134 | 619 | 5 | 9567 | 5948 | 6 | 8922 | 8245 | 5 | 3837 | 2598 | 6 |
| 24 h (3) | 11789 | 5191 | 5 | 6619 | 2723 | 4 | 4429 | 3400 | 6 | 3462 | 1954 | 6 |
| 48 h (3) | 15616 | 7260 | 5 | 7258 | 3704 | 4 | 5879 | 3175 | 6 | 3750 | 1558 | 6 |
| 120 h (3) | | | | | | | | | | | | |
| 24 h (4) | | | | | | | | | | | | |
| 48 h (4) | 7011 | 2911 | 5 | 8137 | 4271 | 6 | 12037 | 7024 | 5 | 4293 | 3191 | 5 |

TABLE 12.4.2.4
Absolute CD8+ cells per 100 mg tumor as determined by FACS in satellite animals.

| Time (after | | | | TPP-15285 | | | TPP-15285 | | | TPP-15285 | | |
|---|---|---|---|---|---|---|---|---|---|---|---|---|
| treatment | Vehicle | | | 0.1 mg/kg | | | 1 mg/kg | | | 5 mg/kg | | |
| no.) | Mean | SD | n | Mean | SD | n | Mean | SD | n | Mean | SD | n |
| 24 h (1) | 12743 | 4875 | 4 | 7549 | 4679 | 5 | 17691 | 18215 | 6 | 13238 | 7023 | 5 |
| 48 h (1) | 9626 | 4564 | 5 | 11880 | 4806 | 6 | 8949 | 5814 | 6 | 16745 | 15525 | 6 |
| 120 h (1) | 25694 | 24727 | 5 | 13604 | 7778 | 6 | 56974 | 26915 | 6 | 19107 | 14265 | 6 |
| 24 h (2) | 15518 | 6383 | 3 | 19344 | 10833 | 6 | 16597 | 6630 | 4 | 13271 | 8470 | 16 |
| 48 h (2) | 18726 | 8477 | 4 | 34655 | 15707 | 6 | 33039 | 18954 | 6 | 14310 | 7167 | 6 |
| 120 h (2) | 8122 | 4436 | 5 | 46685 | 34541 | 6 | 38352 | 38235 | 5 | 53765 | 26430 | 6 |
| 24 h (3) | 25371 | 22860 | 5 | 18750 | 8436 | 4 | 34955 | 10345 | 6 | 41932 | 30806 | 5 |
| 48 h (3) | 32308 | 23581 | 5 | 24993 | 21998 | 4 | 39662 | 17864 | 6 | 69106 | 23874 | 6 |
| 120 h (3) | | | | | | | | | | | | |
| 24 h (4) | | | | | | | | | | | | |
| 48 h (4) | 17885 | 14712 | 5 | 32814 | 19935 | 6 | 50298 | 13584 | 5 | 34091 | 10942 | 5 |

### Example 12.5: Efficacy of Anti-CCR8 Antibody TPP-15285 in F9 Tumor Bearing Mice

[1988] The anti-CCR8 surrogate antibody TPP-15285 showed dose-dependent efficacy in F9 tumor bearing mice with strong effects in the 10 mg/kg and 1 mg/kg dose groups, but reduced efficacy in the 0.4 mg/kg dose group, comparable to the efficacy of anti-PD-L1 antibody (FIG. 52, FIG. 53). Spider plots illustrate these results on an individual mouse base (FIG. 54).

[1989] Treg analysis of F9 tumor samples 24 hours after the second antibody treatment was performed by flow cytometry and showed strongly reduced numbers of Tregs in the 10 mg/kg dose anti-CCR8 antibody treated group versus the isotype control group. Treg depletion was clearly dose-dependent (FIG. 55). Treg depletion was also observed for anti-PD-L1 antibody treatment. Additionally, a strong and dose-dependent increase of CD8+ T cells in the tumors was demonstrated for all dose groups of TPP-15285 as well as for anti-PD-L1 antibody (FIG. 55). Further effects on various immune cell populations are shown in FIG. 55, FIG. 56 and Table 12.5.1.

TABLE 12.5.1
Effects of anti-CCR8 antibodies or anti-PDL1 antibody on immune cell populations and
their ratios at 24 hours after second treatment.

| | mIgG2a | TPP15285, | TPP15285, | TPP15285, | mIgG1 | |
|---|---|---|---|---|---|---|
| | iso | 10 mg/kg | 1 mg/kg | 0,4 mg/kg | iso | PDL1 |
| Mean # Tregs | 25324 | 10642 | 22734 | 41111 | 26435 | 17105 |
| % Tregs relative | 100 | 42 | 90 | 162 | 100 | 65 |
| to iso ctrl | | | | | | |
| Mean # CD8+ T | 113947 | 553074 | 388731 | 291603 | 99850 | 246400 |
| cells | | | | | | |
| % CD8+ T cells | 100 | 485 | 341 | 256 | 100 | 247 |
| relative to iso ctrl | | | | | | |
| Ratio CD8+ T | 5.1 | 54.4 | 15.9 | 7.7 | 3.3 | 15. |
| cells:Tregs | | | | | | |
| Ratio CD4+ conv | 2.2 | 28.5 | 9.6 | 4.6 | 3.0 | 5.7 |
| cells:Tregs | | | | | | |
| Mean # CD45+ | 435118 | 1191853 | 1080867 | 1042860 | 578616 | 615440 |
| % CD45+ cells | 100 | 274 | 248 | 240 | 100 | 106 |
| relative to iso ctrl | | | | | | |
| Mean # CD4 | 49812 | 294714 | 230463 | 179896 | 89198 | 98995 |
| conv cells | | | | | | |
| % CD4 conv | 100 | 592 | 463 | 361 | 100 | 111 |
| cells relative to | | | | | | |
| iso ctrl | | | | | | |
| Mean # CD4+ | 81866 | 335500 | 279725 | 240886 | 128434 | 126134 |
| cells | | | | | | |
| % CD4+ T cells | 100 | 410 | 342 | 294 | 100 | 98 |
| relative to iso ctrl | | | | | | |
| Mean # NK cells | 83353 | 75576 | 119531 | 172201 | 121590 | 79803 |
| % NK cells | 100 | 91 | 143 | 207 | 100 | 66 |
| relative to iso ctrl | | | | | | |

### Example 12.6: Efficacy of Anti-CCR8 Antibodies in Combination Therapy

[1990] Various experiments were performed to analyze the efficacy of anti-CCR8 antibodies alone or in combination with checkpoint targeting antibodies, such as anti-PD-L1, anti-PD1, and anti-CTLA4 antibodies. Combination with these checkpoint targeting molecules was found to provide additional efficacy. In addition, further combination treatments were evaluated, e.g. with chemotherapeutic agents such as oxaliplatin, doxorubicin, gemcitabine or radiation therapy. Table 12.6.1 summarizes the results for different combination treatments. Additional benefit was observed, if the treatment with the second therapeutic agent was started only after the start of treatment with anti-CCR8 antibody.

TABLE 12.6.1
Anti-CCR8 antibody combination treatments and results.

| Tumor model | | | Further |
|---|---|---|---|
| [Example] | Combination treatment | Results | benefit |
| C38 | TPP-15285 (10 mg/kg) | CR combo: 8/10; | ++ |
| [12.6.1] | Anti-PD-L1 ab (3 mg/kg) | CR anti-CCR8 ab mono: 3/10; | |
| | | CR anti-PD-L1 ab mono: 0/10 | |
| CT26 | TPP-15285 (10 mg/kg) | T/C combo: 0.45; | + |
| (large tumors) | Anti-PD-L1 ab (10 mg/kg) | T/C anti-CCR8 ab mono: 0.57; | |
| [data not shown] | | T/C anti-PD-L1 ab mono: 0.79 | |
| B16F10-OVA | TPP-15285 (10 mg/kg) | T/C combo: 0.13; | ++ |
| [12.6.2] | Anti-CTLA4 ab (10 mg/kg) | T/C anti-CCR8 ab mono: 0.37; | |
| | | T/C anti-CTLA4 ab mono: 0.30 | |
| EMT-6 | TPP-15285 (1 mg/kg) | Synergistic efficacy in combination; | ++ |
| [12.6.3] | Anti-PD-1 ab (10 mg/kg) | no efficacy in monotherapy | |
| C38 (survival) | TPP-15285 (5 mg/kg) | CR combo: 10/10; | ++ |
| [12.6.4] | Anti-PD-1 ab (5 mg/kg) | CR anti-CCR8 ab mono: 9/10; | |
| | | CR anti-PD-1 ab mono: 4/10 | |
| MB49 | TPP-15285 (10 mg/kg) | T/C combo: 0.16; | ++ |
| [12.6.5] | Anti-PD-1 ab (10 mg/kg) | T/C anti-CCR8 ab mono: 0.37; | |
| | combo start after CCR8 | T/C anti-PDI ab mono: 0.63 | |
| | treatment | | |
| EMT-6 | TPP-15285 (5 mg/kg) | T/C (day: 19) | + |
| [12.6.6] | Oxaliplatin (5 mg/kg) | anti-CCR8 ab mono: 0.20 | |
| | Doxorubicin (6 mg/kg) | Oxaliplatin mono: 0.61 | |
| | Docetaxel (10 mg/kg) | Doxorubicin mono: 0.43 | |
| | | Docetaxel mono: 0.50 | |
| | | Combo with Oxaliplatin: 0.26 | |
| | | Combo with Doxorubicin: 0.19 | |
| | | Combo with Docetaxel: 0.20 | |
| | | Combo: synergistic effects in final tumoral | |
| | | CD8/Treg ratio as well as in frequency of | |
| | | activated CD8+CD25+ T cells in the blood | |
| Lewis Lung | TPP-15285 (10 mg/kg) | T/C (day: 25) | + |
| [12.6.7] | Anti-PD-1 ab (10 mg/kg) | Combo with aPD-1: 0.67* | |
| | Anti-PD-L1 ab (10 mg/kg) | Combo with aPD-L1: 0.93 | |
| | Anti-CTLA4 ab (10 mg/kg) | anti-CCR8 ab mono: 0.78 | |
| | combo start after | anti-PD-1 mono: 0.91 | |
| | anti-CCR8 ab treatment | anti-PD-L1 mono: 0.96 | |
| | | anti-CTLA4 mono: 1.10 | |
| | | *increased CD8+ frequency and | |
| | | CD8/Treg ratio at study end | |
| MB49 | TPP-15285 (10 mg/kg) | T/C (day: 14) | ++ |
| [FIG. 68] | Anti-PD-L1 ab (10 mg/kg) | Combo with aPD-L1: 0.35 | |
| | Anti-PD-1 ab (10 mg/kg) | Combo with aPD-1: 0.37 | |
| | Gem citabine (100 mg/kg) | Combo with Gemcitabine: 0.56 | |
| | combo start after CCR8 | anti-CCR8 ab mono: 0.61 | |
| | treatment | anti-PD-L1 ab mono: 0.67 | |
| | | anti-PD-1 ab mono: 0.79 | |
| | | Gemcitabine mono: 0.73 | |
| EMT-6 | TPP-15285 (3 mg/kg) | Combo: 0.42 | ++ |
| [12.6.8] | 3 × 2 Gy Radiotherapy | 3 × 2 Gy alone: 0.80 | |
| | | anti-CCR8 ab mono: 0.54 | |
| MBT2 | TPP-15285 (10 mg/kg) | T/C (day: 24) | ++ |
| [12.6.9] | Anti-PD-L1 ab (10 mg/kg) | Combo with aPD-L1 ab: 0.41 | |
| | Anti-PD-1 ab (10 mg/kg) | Combo with aPD-1 ab: 0.15 | |
| | Paclitaxel (10 mg/kg, q4d, | Combo with Paclitaxel: 0.39 | |
| | i.v.) | anti-CCR8 ab mono: 0.5 | |
| | | anti-PD-L1 ab mono: 0.89 | |
| | | anti-PD-1 ab mono: 0.66 | |
| | | Paclitaxel mono: 0.83 | |

[1991] These results demonstrate the beneficial impact of combining anti-CCR8 antibody treatment with further therapeutically active agents. The inventors furthermore conclude that the sequential administration of the therapeutic agents adds additional benefit, if the anti-CCR8 antibody is administered first and if a further therapeutic agent is administered only after an initial reduction of Treg cells (e.g. by at least 50%) has taken place, e.g. as demonstrated in examples 12.6.5 and 12.6.7.

[1992] In view of these experiments and results the inventors are convinced that triple combination, e.g. with an anti-CCR8 antibody, an antibody targeting a checkpoint protein and a targeted therapeutic agent (small molecules as well as antibodies) provides further benefit in survival due to the differences in the modes of action of these treatments. Therefore, the combination of an anti-CCR8 antibody with a checkpoint targeting antibody and a tumor cell targeting antibody or agent is suggested for tumor treatment. In a preferred embodiment, the combination is a combination of a CCR8 antibody, an anti-PD(L)-1 antibody and paclitaxel.

### Example 12.6.1: Efficacy of Anti-CCR8 Antibodies in C38 Tumor Bearing Mice & Combination Therapy with Anti-PD-L1 Antibody

[1993] The anti-CCR8 surrogate antibodies TPP-14099 and TPP-15285 showed strong efficacy in C38 tumor bearing mice, comparable to the efficacy of anti-PD-L1 antibody (FIG. 57a). Combination of TPP-15285 with, 3 mg/kg anti-PD-L1 antibody showed further improved efficacy. Both antibodies were formulated separately in phosphate buffered saline and were applied as in total four individual intraperitoneal injections twice weekly, i.e. in combination at the same day with a simultaneous treatment start.

[1994] Mice were monitored in a survival study over 94 days (FIG. 57b). Remarkably, 8 out of 10 mice treated with combination of anti-CCR8 antibody and anti-PD-L1 antibody survived day 94, 4 out of 10 mice treated with CCR8 antibody TPP-15285 alone survived day 94, and none of the mice treated with anti-PD-L1 antibody alone survived day 94, demonstrating a synergistic efficacy of anti-CCR8 antibody and PD-L1 antibody. C38 is a low infiltrated syngeneic mouse model which uses C38 colon cancer cells for tumor induction. The model is generally considered responsive to anti PD-L1 antibody treatment. In view of the available data described herein, the stratification of patients based on T cell infiltration and/or response to PD-L1 therapy is suggested to provide additional benefit.

[1995] Treg analysis of C38 tumor samples 24 hours after the second antibody treatment by flow cytometry showed strongly reduced numbers of Tregs in the anti-CCR8 antibody treated groups versus isotype control group (FIG. 58). The strongest Treg depletion was observed for the combination of TPP-15285 with anti-PD-L1 antibody. Additionally, the highest CD8+/Treg ratio was observed for the combination of TPP-15285 with anti-PD-L1 antibody. Interestingly, analysis of macrophages showed an increase at day 24 of the study (FIG. 59).

### Example 12.6.2: Efficacy of Anti-CCR8 Antibodies in B16F10-OVA Tumor Bearing Mice & Combination Therapy with Anti-CTLA4 Antibody

[1996] The anti-CCR8 antibody TPP-15285 (10 mg/kg) showed strong efficacy in B16F10-OVA bearing mice comparable to the efficacy of an anti-CTLA4 antibody (10 mg/kg) (FIG. 60). Combination of TPP-15285 with anti-CTLA4 antibody showed synergistic efficacy, correlating with an increase of CD8+ T cells and IFNg/TNFa levels.

[1997] Both antibodies were formulated in PBS and were applied as in total three individual intraperitoneal injections twice weekly, in combination at the same day with a simultaneous treatment start.

[1998] Treg analysis of B16F10-OVA tumor samples 24 hours after the second antibody treatment (day 12) by flow cytometry showed strongly reduced numbers of Tregs in the CCR8-antibody treated groups versus the isotype control group (Table 12.6.2.1). The strongest Treg depletion was observed for the combination of TPP-15285 with anti-CTLA4 antibody. Additionally, the strongest CD8+ T cell increase was observed for the combination of TPP-15285 with anti-CTLA4 antibody.

[1999] FACS analysis of B16F10-OVA-tumors 24 hours after second antibody treatment with TPP-15285+ isotype control, anti-CTLA4 antibody+isotype control or TPP-15285+anti-CTLA4 antibody demonstrated a decrease of intra-tumoral Treg frequency and an increase of absolute numbers of CD8+ T cells.

TABLE 12.6.2.1
Intra-tumoral cell populations determined by FACS and IFNg determined by ELISA at
the study end. *mean for n = 5 samples.

| | mulgG2a + | TPP15285 + | aCTLA4 + | TPP15285 + |
|---|---|---|---|---|
| | hulgG1 isotypes | hulgG1 isotype | mulgG2a isotype | aCTLA4 |
| absolute CD45 | 199442.1 | 437004.9 | 611423.6 | 717324.5 |
| absolute CD8 | 25327.0 | 155532.5 | 220147.5 | 312653.9 |
| absolute Treg | 6261.1 | 9148.6 | 15413.2 | 11448.3 |
| abs NK+ | 11066.6 | 36950.0 | 65954.0 | 57789.1 |
| % NK+ | 5.9 | 8.1 | 10.1 | 7.6 |
| % CD8 | 14.6 | 34.8 | 36.5 | 42.7 |
| % Treg | 31.58 | 18.86 | 23.2 | 8.98 |
| IFNg (pg/ml | 3.80 | 28.83 | 18.40 | 35.70 |
| per mg protein) | | | | |

### Example 12.6.3: Combination Treatment with Anti-PD-1 Antibody and Anti-CCR8 Antibody in EMT-6 Tumor Bearing Mice: Synergistic Efficacy

[2000] The therapeutic efficacies of anti-murine CCR8 antibody TPP-15285 (1 mg/kg) alone, anti-murine PD-1 antibody (CDRs: atezolizumab, 10 mg/kg) alone or combination of TPP-15285 (1 mg/kg) and anti-murine PD-1 antibody (10 mg/kg) were evaluated in EMT-6 tumor bearing mice. Both antibodies were formulated in PBS and applied as in total four individual intraperitoneal injections twice weekly, in combination at the same day with a simultaneous treatment start.

[2001] The anti-CCR8 antibody TPP-15285 showed weak efficacy in EMT-6 bearing mice at a low dose of 1 mg/kg, comparable to the weak efficacy of anti-PD-1 antibody at 10 mg/kg (FIG. 61). Combination of 1 mg/kg TPP-15285 with, 10 mg/kg anti-PD-1 showed synergistic efficacy.

[2002] Treg analysis of EMT-6 tumor samples 24 hours after the second antibody treatment by flow cytometry showed strongly reduced numbers of Tregs in the CCR8-antibody treated groups versus the isotype control group or anti-PD-1 monotherapy (FIG. 62).

TABLE 12.6.3.1
Intra-tumoral cell populations determined by FACS in EMT-6 tumors at the study end.

| | | TPP15285 + | Anti-PD1 ab + | |
|---|---|---|---|---|
| | isotype | isotype | isotype | TPP15285 + |
| Intra-tumoral immune cells | control | control | control | anti-PD1 ab |
| CD4+ (*) | 48583.4 | 27646.1 | 54791.8 | 42312.3 |
| Tregs | 30686.4 | 7998.8 | 28781.7 | 11506.9 |
| (CD4+CD25+FoxP3+) (*) | | | | |
| CD8+T-cells (*) | 13825.7 | 16398.8 | 19233.3 | 23132.7 |
| NK cells | 29119.6 | 44152.1 | 51372.0 | 67155.1 |
| (CD45+CD3+NKp46+) (*) | | | | |
| CD8: Treg ratio | 0.5 | 2.1 | 0.7 | 2.0 |

(*) mean for n = 5 samples, cells/100 mg tumor.

### Example 12.6.4: Combination Treatment with Anti-PD-1 Antibody and Anti-CCR8 Antibody in C38 Tumor Bearing Mice

[2003] The therapeutic efficacies of anti-murine CCR8 antibody TPP-15285 (5 mg/kg) alone, anti-murine PD-1 antibody (aPD-1, CDRs: atezolizumab, 5 mg/kg) alone or combination of TPP-15285 (5 mg/kg) and anti-murine PD-1 antibody (5 mg/kg) were evaluated in C38 tumor bearing mice. Both antibodies were formulated in PBS and applied as in total four individual intraperitoneal injections twice weekly, in combination at the same day with a simultaneous treatment start.

[2004] The anti-CCR8 antibody TPP-15285 showed a strong efficacy in C38 tumor bearing mice which was higher than the efficacy of an anti-PD-1 antibody administered at the same dose (FIG. 63a). After 64 days, combination of 5 mg/kg TPP-15285 with, 5 mg/kg anti-PD-1 antibody showed improved efficacy in survival with, 10/10 complete responders compared to 9/10 for anti-CCR8 monotherapy and 4/10 for anti-PD1 monotherapy (FIG. 63b).

[2005] Treg analysis of C38 tumor samples 24 hours after the second antibody treatment by flow cytometry are shown in FIG. 64, Table 12.6.4.1.

TABLE 12.6.4.1
Intra-tumoral cell populations determined by FACS in C38 tumors 24 hours after the
second antibody treatment.

| | | TPP15285 + | Anti-PD1 ab + | TPP15285 + |
|---|---|---|---|---|
| | isotype | isotype | isotype | Anit-PD1 |
| Intra-tumoral immune cells | control | control | control | ab |
| CD4+ (*) | 79735.2 | 109508.8 | 97352.8 | 189350.0 |
| Tregs | 27132.4 | 24495.8 | 32360.0 | 48581.6 |
| (CD4+CD25+FoxP3+) (*) | | | | |
| CD8+ T-cells (*) | 44063.8 | 151644.0 | 160225.4 | 291992.8 |
| NK cells | 124067.0 | 173865.5 | 115642.8 | 295252.5 |
| (CD45+CD3+NKp46+) (*) | | | | |
| CD8: Treg ratio | 1.7 | 6.0 | 4.7 | 10.2 |

(*) mean for n = 5 samples, cells/100 mg tumor.

### Example 12.6.5: Sequential Combination Treatment of Anti-CCR8 Antibody with Anti-PD-1 Antibody in MB49 Tumor Bearing Mice

[2006] The therapeutic efficacy of anti-murine CCR8 antibody TPP-15285 (10 mg/kg) alone, anti-murine PD-1 antibody (CDRs: atezolizumab, 10 mg/kg) alone and combination of TPP-15285 (10 mg/kg) and anti-PD-1 antibody (10 mg/kg) was evaluated in a study in MB49-tumor bearing mice. In this study, the first dose of anti-PD1 antibody was administered only after anti-CCR8 antibody, i.e. after allowing the anti-CCR8 antibody to cause an effect on Tregs leading to an increased CD8+ T cell to Treg ratio. More specifically, treatment with anti-PD1 antibody was started 24 hours after the second anti-CCR8 antibody treatment. Anti-CCR8 antibody TPP-15285 showed a strong efficacy in MB49 tumor bearing mice that was also higher than for anti-PD1 antibody (FIG. 65). Combination of 10 mg/kg TPP-15285 with, 10 mg/kg anti-PD-1 showed further improved efficacy.

[2007] FACS analysis of MB49-derived tumor samples at the study end showed increased CD45+ cell, CD8+ cell and NK cell frequency and reduced frequency of Tregs in the anti-CCR8 antibody treated groups versus vehicle control group or anti-PD-1 antibody monotherapy (FIG. 66, Table 12.6.5.1).

[2008] MB49 is a medium infiltrated syngeneic model using bladder cancer cells which is responsive to immune checkpoint inhibitor (ICI) therapy. In view of these data, the stratification of subjects for low immune infiltration and/or response to ICI therapy is suggested to provide additional benefit for this combination therapy.

[2009] In particular, the start of combination treatment after anti-CCR8 antibody treatment was found to provide a benefit. Without being bound by theory, the inventors assume that initial depletion of Tregs by CCR8 antibodies enhances the activity of antigen-presenting cells and priming of tumoral T cells resulting in improved sensitivity for checkpoint inhibitors such as PD-(L)1, because Tregs as tumor-cell extrinsic factors play a role for primary and adaptive resistance to checkpoint inhibitors in cancer patients.

TABLE 12.6.5.1
Intra-tumoral cell populations determined by FACS in MB49 tumors at the study end.

| | isotype | | | TPP15285 + |
|---|---|---|---|---|
| Intra-tumoral immune cells | control | TPP15285 | Anti-PD1 ab | anti-PD1 ab |
| CD45+ cells (in % of live) | 30.1 | 53.2 | 40.9 | 72.7 |
| Tregs (CD4+CD25+FoxP3+ | 27.6 | 17.7 | 20.6 | 18.6 |
| cells in % of CD4+ cells) (*) | | | | |
| CD8+ cells (in % of CD45+) | 6.3 | 8.4 | 8.3 | 16.3 |
| NK cells (NKp46+ cells in % | 4.0 | 5.6 | 3.7 | 6.4 |
| of CD45+ cells) | | | | |
| CD8: Treg ratio | 11.0 | 10.9 | 12.7 | 20.8 |

(*) mean for n = 5 samples, cells/100 mg tumor.

### Example 12.6.6: Combination Treatment Comprising Anti-CCR8 Antibody and Chemotherapy in EMT-6 Tumor Bearing Mice

[2010] The therapeutic efficacies of anti-CCR8 antibody TPP-15285 (5 mg/kg, q3/4d i.p.) alone, Oxaliplatin (5 mg/kg, q4d i.p.) alone, Doxorubicin (6 mg/kg, i.v. SD) alone, Docetaxel (10 mg/kg, q2dx5, i.v.) alone or a combination of TPP-15285 with either Oxaliplatin, Doxorubicin or Docetaxel were evaluated in EMT-6 tumor bearing mice. Therapeutics were formulated in PBS, combination treatment started at the same day with a simultaneous treatment start.

[2011] While the combination of anti-CCR8 antibody with each chemotherapeutic agent provided benefit over the monotherapy with that chemotherapeutic agent, the combination was not superior over anti-CCR8 monotherapy (FIG. 67). The inventors are convinced, that sequential administration of the therapeutic agents is beneficial, allowing the anti-CCR8 antibody to effectively deplete Tregs before the chemotherapeutic is applied to deplete fast dividing cells.

[2012] Immune cell populations were analyzed at the end of the study, both in tumor and in blood by flow cytometry, cf. Table 12.6.6.1 and Table 12.6.6.2. For combination treatments intra-tumoral CD8/Treg ratio and frequency of activated CD8+CD25+ T cells in the blood was increased compared to each monotherapy and control.

[2013] Furthermore, IFN gamma, IL10, IL12p70, IL1beta, IL2 and TNF alpha were analyzed. Increased levels of IFN gamma, IL-1b and IL-2 were observed in mono and combo groups. Increase of TNF alpha was observed in combo groups only (data not shown).

TABLE 12.6.6.1
Intra-tumoral cell populations determined by FACS at the end of the study. *mean for
n = 5 samples, cells/100 mg tumor if not specified otherwise.
EMT-6, tumor

| | | | | | | | TPP15285 + | |
|---|---|---|---|---|---|---|---|---|
| | Vehicle | | Oxali- | Doxo- | Doce- | TPP15285 + | Doxo- | TPP15285 + |
| | (PBS) | TPP15285 | platin | rubicin | taxel | Oxaliplatin | rubicin | Docetaxel |
| absolute CD8+ cells | 19215.4 | 106043.2 | 42872.6 | 43123.8 | 62549.6 | 107959.2 | 61187.0 | 56554.2 |
| absolute Tregs | 7397.0 | 12816.0 | 7075.2 | 12995.4 | 20688.0 | 6358.0 | 4363.0 | 4693.8 |
| CD8+ cell/Treg ratio | 2.9 | 11.1 | 7.3 | 2.7 | 3.1 | 22.3 | 15.9 | 13.0 |
| % CD8+ cells of | 1.8 | 14.0 | 5.9 | 5.6 | 5.4 | 13.1 | 14.6 | 9.4 |
| CD45+ cells | | | | | | | | |
| % act. CD8+ cells of | 37.7 | 13.9 | 26.8 | 22.0 | 17.9 | 17.1 | 21.4 | 23.1 |
| CD8+ cells | | | | | | | | |
| % NK cells of CD45+ | 5.3 | 7.9 | 4.2 | 5.0 | 4.8 | 4.8 | 8.6 | 6.5 |
| cells | | | | | | | | |

TABLE 12.6.6.2
Blood immune cell populations determined by FACS at the end of the study. *mean for
n = 5 samples, cells/100 μl blood.
EMT-6, blood

| | | | | | | | TPP15285 + | |
|---|---|---|---|---|---|---|---|---|
| | Vehicle | | Oxali- | Doxo- | Doce- | TPP15285 + | Doxo- | TPP15285 + |
| | (PBS) | TPP15285 | platin | rubicin | taxel | Oxaliplatin | rubicin | Docetaxel |
| absolute CD8+ | 13599.6 | 12491.2 | 5208.8 | 5502.0 | 9840.2 | 4094.8 | 4139.8 | 7000.8 |
| cells | | | | | | | | |
| absolute Tregs | 1333.2 | 807.8 | 511.8 | 549.2 | 833.8 | 390.8 | 364.8 | 709.2 |
| Absolute | 188940 | 166472 | 12071 | 10499 | 10500 | 47850 | 65061 | 121155 |
| CD45+ cells | | | 3 | 1 | 2 | | | |
| CD8+ cell/Treg | 12.4 | 15.6 | 13.8 | 12.6 | 12.2 | 10.0 | 13.2 | 10.2 |
| ratio | | | | | | | | |
| % CD8+ cells of | 7.1 | 6.9 | 5.4 | 5.6 | 9.5 | 8.2 | 6.7 | 6.3 |
| CD45+ cells | | | | | | | | |
| % act. CD8 of | 1.6 | 3.1 | 2.0 | 3.5 | 4.2 | 6.7 | 10.7 | 10.3 |
| CD8+ cells | | | | | | | | |

### Example 12.6.7: Sequential Combination Treatment with Anti-PD-(L)1 Antibody and Anti-CCR8 Antibody in Lewis Lung Carcinoma Bearing Mice

[2014] The therapeutic efficacies of anti-CCR8 antibody TPP-15285 (10 mg/kg) alone, anti-PD-1 antibody (aPD-1, CDRs: atezolizumab, 10 mg/kg) alone, anti-PD-L1 antibody (10 mg/kg) alone, anti-CTLA4 antibody alone, TPP-15285 (10 mg/kg) and anti-PD-1 antibody (10 mg/kg) in combination, or TPP-15285 (10 mg/kg) and anti-PD-L1 antibody (10 mg/kg) in combination were evaluated in Lewis lung tumor bearing mice (FIG. 69). Antibodies were formulated in PBS. For the anti-CCR8 antibody, doses were administered at day 11, 14, 18 and 22 after tumor inoculation. For combination treatment, administration of anti-PD-(L)1 antibody started 24 hours after the 2^{nd} anti-CCR8-antibody dose. At this time point, FACS analysis showed an intra-tumoral Treg depletion for the TPP-15285 mono group of 60% relative to the isotype control (data not shown).

[2015] Lewis lung was used as a syngeneic model with a suppressive tumor microenvironment and is known to be not responsive for anti PD-(L)1 treatment and anti-CTLA4 treatment. No monotherapeutic efficacy of TPP-15285 was observed despite effective Treg depletion measured 24 hours after 2^{nd} treatment. However, the combination treatment with anti-murine PD-1 antibody after anti-CCR8 antibody showed improved efficacy and this was also associated with increased CD8/Treg ratio at study end (Table 12.6.7.1).

TABLE 12.6.7.1
Intra-tumoral cell populations determined by FACS at the study end. *mean for n = 5
samples.

| | | | | TPP15285 + | | TPP15285 + |
|---|---|---|---|---|---|---|
| Intra-tumoral | Vehicle | | Anti-PD- | Anti-PD- | Anti-PD- | Anti-PD- |
| cells | (PBS) | TPP15285 | 1 ab | 1 ab | L1 ab | L1 ab |
| absolute CD8+ | 4682.4 | 7617.0 | 4593.8 | 6162.2 | 5684.4 | 7769.4 |
| absolute Tregs | 1202.6 | 1452.0 | 1207.0 | 805.8 | 1480.6 | 1355.0 |
| CD8/Treg ratio | 4.0 | 7.9 | 6.0 | 7.3 | 4.7 | 5.1 |
| % CD8 | 0.7 | 0.8 | 0.6 | 1.5 | 0.8 | 0.9 |
| % activated CD8 | 19.8 | 14.9 | 11.9 | 12.2 | 24.5 | 18.6 |

### Example 12.6.8: Combination Treatment Comprising Anti-CCR8 Antibody and Radiotherapy in EMT-6 Tumor Bearing Mice

[2016] The therapeutic efficacies of anti-CCR8 antibody TPP-15285 (3 mg/kg) or radiotherapy (RT, 3×2 Gy) were evaluated alone or in combination in EMT-6 tumor bearing mice (FIG. 70). Combination treatment was started with, 3×2 Gy fractionated irradiation, followed by 3 mg/kg biw×2. Radiation therapy alone only mildly delayed tumor growth. Combination of anti-CCR8 antibody and radiotherapy showed only minor improvement in efficacy but Treg depletion at study end was more pronounced than for each monotherapy (data not shown).

### Example 12.6.9: Combination Treatment Comprising Anti-CCR8 Antibody and Administration of PD-1 Antibody, PD-L1 Antibody, or Paclitaxel in MBT2 Tumor Bearing Mice

[2017] The therapeutic efficacies of inventive anti-CCR8 antibody, anti-PD-1 antibody, anti-PD-L1 antibody, or Paclitaxel were tested alone or in combination in MBT2 syngeneic tumor bearing mice as shown in Table 12.6.9.1. Each group comprised 10 tumor-bearing mice and treatment started at day 10 after inoculation, when tumors had reached a size of about 100 mm³. Among the single treatment groups, anti-CCR8 showed the strongest and a significant anti-tumor effect. The anti-tumor effect of anti-PD-1 antibody, anti-PD-L1 antibody, or Paclitaxel was significantly increased by combining these treatments with anti-CCR8 therapy. Antibodies were formulated in PBS. T/C ratios were analyzed after three weeks of bi-weekly treatment.

TABLE 12.6.9.1
Treatment groups and T/C ratio relative to isotype control at day 24.

| Group | Treatment | Dose | Route | Dose scheme | T/C |
|---|---|---|---|---|---|
| 01 | Isotype control | 10 mg/kg | i.p. | BIW | 1 |
| 02 | Anti-CCR8 antibody TPP15285 | 10 mg/kg | i.p. | BIW | 0.50 |
| 03 | anti-PDL1 antibody | 10 mg/kg | i.p. | BIW | 0.89 |
| 04 | anti-PD1 antibody | 10 mg/kg | i.p. | BIW | 0.66 |
| 05 | Paclitaxel | 10 mg/kg | i.v. | Q4D | 0.83 |
| 06 | Combination: TPP15285 + anti-PDL1 ab | 10 mg/kg | i.p. + i.p. | BIW + BIW | 0.41 |
| 07 | Combination of TPP15285 + anti-PD1 ab | 10 mg/kg | i.p. + i.p. | BIW + BIW | 0.15 |
| 08 | Combination of TPP15285 + Paclitaxel | 10 mg/kg | i.p. + i.v. | BIW + Q4D | 0.39 |

TABLE 12.6.9.2
CD8 mRNA levels are increased after anti-CCR8 combination treatments. CD8 mRNA levels
were obtained via RNA-seq performed on MBT2 tumors obtained 24 h after the end of the treatment
cycle. Average CD8 expression levels were computed for 10 tumors from each treatment group. Anti-
CCR8 treatment alone significantly increased CD8 levels compared to isotype while PD1, PDL1, and
paclitaxel had no significant effect. CD8 levels were further increased by combining anti-CCR8 treatment
with the other three treatments. The most significant and strongest increase of over 8-fold was obtained
by the combination of anti-CCR8 with anti-PD1 treatment.

| | Mean CD8 | Standard | Fold change to | T-test |
|---|---|---|---|---|
| Treatment | expression | deviation | Isotype | p-value |
| Isotype [TPP10748] | 7.493 | 1.378 | 1.000 | 1.0E+00 |
| anti-CCR8 [TPP15285, 10 mg/kg, BIW] | 9.308 | 1.282 | 3.518 | 2.5E−04 |
| anti-PD-L1 [10 mg/kg, BIW] | 7.929 | 1.448 | 1.353 | 3.6E−01 |
| anti-PD1 [10 mg/kg, BIW] | 8.156 | 0.915 | 1.583 | 1.1E−01 |
| Paclitaxel [10 mg/kg, Q4D] | 8.260 | 1.197 | 1.702 | 9.2E−02 |
| anti-CCR8 + PDL1 | 9.805 | 0.984 | 4.966 | 2.3E−06 |
| anti-CCR8 + PD1 | 10.524 | 1.078 | 8.171 | 9.4E−08 |
| anti-CCR8 + Paclitaxel | 9.018 | 1.088 | 2.876 | 6.9E−04 |

TABLE 12.6.9.3
Tumor sizes at day 24 are significantly reduced by anti-CCR8 treatment and further
reduced by combining anti-CCR8 with either PD1 antibody (Crown VivoPremium, Catalog No RMP1-
14), PDL1 antibody (CrownVivoPremium, Catalog No CVP034), or Paclitaxel. Largest and most
significant reduction in tumor size compared to isotype control is achieved by the combination of anti-
CCR8 with anti-PD1 antibody.

| | | Mean tumor | SD tumor | T/C | T-test |
|---|---|---|---|---|---|
| Group | Treatment | size [mm3] | size [mm3] | ratio | p-value |
| 1 | Isotype [TPP10748] | 3108.8 | 697.9 | 1 | 1.00E+00 |
| 2 | anti-CCR8 [TPP15285, 10 mg/kg, BIW] | 1539.9 | 1431.4 | 0.50 | 1.38E−02 |
| 3 | anti-PD-L1 [10 mg/kg, BIW] | 2758.1 | 972.3 | 0.89 | 4.33E−01 |
| 4 | anti-PD1 [10 mg/kg, BIW] | 2051.7 | 1491.6 | 0.66 | 1.03E−01 |
| 5 | Paclitaxel [10 mg/kg, Q4D] | 2566.2 | 963.7 | 0.83 | 2.53E−01 |
| 6 | anti-CCR8 + PDL1 | 1274.9 | 1159.0 | 0.41 | 1.68E−03 |
| 7 | anti-CCR8 + PD1 | 473.1 | 571.7 | 0.15 | 4.12E−06 |
| 8 | anti-CCR8 + Paclitaxel | 1197.1 | 826.4 | 0.39 | 3.14E−04 |

### Example 12.7.1: Correlation Between Anti PD-L1 Antibody Response and Anti-CCR8 Antibody Response

[2018] In order to benchmark the efficacy of anti-CCR8 antibody treatment against treatment with anti-PD-L1 antibody, the outcomes for the different syngeneic tumor models were assembled, see Table 12.7.1.1. Surprisingly, a good response to anti-PD-L1 antibody treatment—as measured e.g. by T/C volume—was also predictive for a good response to anti-CCR8 antibody treatment. PD-L1 expression is a known predictor to select responders to anti-PD-L1 treatment. From these observations, the inventors hypothesized that PD-L1 expression might likewise be suitable to stratify subjects in order to identify those which would most likely profit from anti-CCR8 antibody treatment. This hypothesis could be retroactively validated by correlating the PD-L1 expression levels with tumor volume.

TABLE 12.7.1.1
Comparison between responses to anti PD-L1 antibody vs. anti-CCR8 antibody for
different syngeneic models.

| | | | T/Cᵥₒₗ | | | Tumoral | |
|---|---|---|---|---|---|---|---|
| | | General | (end of | | % Treg | CD8+ | ORR ^{#} |
| | Tumor | immune cell | experiment) | | depletion ¹ | change* | (% CR) |
| | Model | infiltration | aCCR8 | aPDL1 | aCCR8 | aCCR8 | aCCR8 |
| Responding | CT26 | high | 0.18 | 0.68 | 82.3 | 2.84 ¹ | 72 (30) |
| models | EMT-6 | medium | 0.28 | 0.68 | 61.6 | 5.89 | 90 (0) |
| | F9 | medium | 0.21 | 0.25 | 73.2 | 4.85 ¹ | 60 (30) |
| | C38 | low | 0.23 | 0.58+ | 68.2 | 1.32 ¹ | 40 (30) |
| | B16F10- | low | 0.37 | n.d. | 59.0 | 6.14 | 0 (0) |
| | OVA | | | | | | |
| Non-resp. | 4T1 | medium | 0.90 | >0.9** | 37.1 | 2.37 | 0 (0) |
| Models | B16F10 | low | 0.95 | >0.9** | 7.5 | 1.39 | 0 (0) |

### Example 12.7.2: Correlation Between Anti-Tumor Response and mRNA Biomarker for Stratification or Disease Control

[2019] Mean gene expression (RNA-seq) in early untreated tumors (100-200 mm³ in size, N=10 per model), larger untreated tumors (500 and 1000 mm³) or at the end of the study was correlated with T/C ratios of 21 syngeneic mouse models treated with TPP-14099 or TPP-15285 as described elsewhere herein.

[2020] Top correlated genes were found to be significantly enriched with T cell and inflammation markers (pearson correlation values), cf. Table 12.7.2.1. Inflammation marker IFNg and IFNg response genes (e.g. Gbp3/4/5/8/9, Cxcl9, Acod1), PDL1 (CD276), C1 complement factors, T cell genes such as Klra3/5, and Tray, as well as Treg markers CD25 (IL2RA), FOXP3, and CTLA4 are among the genes most correlated with response.

[2021] Table 12.7.2.2 shows fold change of expression in responder cell lines (T/C<0.6) versus non-responder cell lines (T/C >0.6) for early untreated tumors. The 100 genes with largest expression fold change between responders and non-responders are listed. IFNg and IFNg response genes (e.g. Gbp2/3/4/8/10/11, Cxcl9/11, Ubd), cytotoxic T cell markers (e.g. Granzymes, Prf1), as well as Mast cell markers (Tpsab1, Cma1, Tpsb2), and C1 complement factors are among the genes most predictive of response.

[2022] Table 12.7.2.3 shows fold change of expression in responder cell lines (T/C<0.6) versus non-responder cell lines (T/C>0.6) for larger untreated tumors (500 and 1000 mm³).

[2023] Biomarker candidates are listed in Table 12.7.2.1, 12.7.2.2 and 12.7.2.3. Patients with high expression of the human counterparts of these genes or a combination or signature of the human counterparts of these genes can thus be expected to respond to anti-CCR8 treatment in the clinic. Furthermore, these markers or their combination can also be used to monitor the treatment success. Biomarkers derived from genes in italics/bold are particularly preferred.

TABLE 12.7.2.1
Suitable biomarkers correlating with anti-tumor response
achieved with inventive anti-CCR8 antibodies.
These biomarkers were found upregulated in early untreated tumors and
correlated with treatment response.
Biomarker derived from genes in italics/bold are particularly preferred.
The 100 genes with largest negative correlation coefficient (r values are
shown) between expression and T/C ratios are listed.

| Gene | R |
|---|---|
| Grin2d | −0.658 |
| Olfr1395 | −0.656 |
| Olfrl122 | −0.655 |
| Gbp8 | −0.638 |
| Mir8098 | −0.626 |
| [symbol] | −0.62 |
| Eny2 | −0.618 |
| Hebp1 | −0.614 |
| [symbol] | −0.614 |
| [symbol] | −0.613 |
| Esyt2 | −0.611 |
| Clic6 | −0.607 |
| Greb11 | −0.606 |
| [symbol] | −0.604 |
| Pinc | −0.603 |
| Cenpt | −0.602 |
| [symbol] | −0.601 |
| Fam26f | −0.6 |
| [symbol] | −0.6 |
| Hectd2 | −0.596 |
| Chmp5 | −0.593 |
| Pcdhb22 | −0.59 |
| Slitrk4 | −0.589 |
| Il18bp | −0.586 |
| Cyth2 | −0.585 |
| Fkbp15 | −0.583 |
| [symbol] | −0.582 |
| Eif3h | −0.579 |
| Rab8a | −0.578 |
| Xpa | −0.578 |
| Suox | −0.578 |
| Scgb1b30 | −0.578 |
| Rarres2 | −0.574 |
| Ywhag | −0.573 |
| Fgl2 | −0.573 |
| Wdtc1 | −0.572 |
| [symbol] | −0.571 |
| Batf2 | −0.571 |
| Olfr56 | −0.571 |
| Cneplrl | −0.571 |
| Emp1 | −0.57 |
| Klf4 | −0.567 |
| Hrh4 | −0.566 |
| [symbol] | −0.566 |
| Nlrp9c | −0.565 |
| Fam129b | −0.564 |
| [symbol] | −0.562 |
| [symbol] | −0.562 |
| Tmsb15a | −0.56 |
| Pla2g15 | −0.559 |
| Cfb | −0.558 |
| Prm1 | −0.556 |
| [symbol] | −0.556 |
| Stat1 | −0.556 |
| Nfkbiz | −0.554 |
| [symbol] | −0.553 |
| Ano8 | −0.552 |
| Slc12a9 | −0.552 |
| Nr1h2 | −0.552 |
| Aip | −0.552 |
| Shisa5 | −0.551 |
| Bcl2a1c | −0.55 |
| Fam32a | −0.548 |
| Tatdn1 | −0.547 |
| Cd200r4 | −0.547 |
| [symbol] | −0.546 |
| [symbol] | −0.545 |
| Ttc39c | −0.544 |
| Klk10 | −0.544 |
| Crybg1 | −0.543 |
| Gnb2 | −0.542 |
| Ctsg | −0.542 |
| Olfr1396 | −0.542 |
| [symbol] | −0.54 |
| ENS87554 | −0.54 |
| Dnah7a | −0.539 |
| Yipf4 | −0.538 |
| [symbol] | −0.538 |
| [symbol] | −0.534 |
| Ccdc9 | −0.533 |
| [symbol] | −0.533 |
| [symbol] | −0.533 |
| Epb4114a | −0.533 |
| [symbol] | −0.533 |
| [symbol] | −0.532 |
| Myo1e | −0.529 |
| Wdr60 | −0.529 |
| Trim56 | −0.528 |
| Ppp1r15a | −0.526 |
| Iigp1 | −0.526 |
| Fes | −0.524 |
| Trim12c | −0.523 |
| Psmg4 | −0.523 |
| Igfbp5 | −0.521 |
| Itgb1 | −0.52 |
| Klf9 | −0.518 |
| Actr1a | −0.518 |
| [symbol] | −0.517 |
| Siah1a | −0.516 |
| [symbol] | −0.516 |

TABLE 12.7.2.2
Suitable biomarkers correlating with anti-tumor response achieved with
inventive anti-CCR8 antibodies. Fold change of expression in responder
cell lines (T/C < 0.6) versus non-responder cell lines (T/C > 0.6).
Top correlated (pearson) genes were found significantly enriched with
T cell and inflammation markers.

| Gene | Log-fold change |
|---|---|
| [symbol] | 4.6 |
| Msln | 4.4 |
| Klk10 | 4.2 |
| Mcpt2 | 3.5 |
| [symbol] | 3.4 |
| Foxgl | 3.2 |
| [symbol] | 3.2 |
| [symbol] | 3.1 |
| Svt8 | 3.1 |
| Cxcl9 | 3.0 |
| Hectd2 | 2.9 |
| Lgals7 | 2.9 |
| [symbol] | 2.8 |
| Zfpm2 | 2.8 |
| Dynap | 2.7 |
| Cdh17 | 2.7 |
| [symbol] | 2.7 |
| [symbol] | 2.7 |
| [symbol] | 2.6 |
| Mcpt1 | 2.6 |
| [symbol] | 2.6 |
| [symbol] | 2.6 |
| Greb11 | 2.6 |
| Brinp3 | 2.6 |
| Serpinb9b | 2.6 |
| [symbol] | 2.5 |
| Itgb4 | 2.5 |
| [symbol] | 2.5 |
| [symbol] | 2.5 |
| AW112010 | 2.5 |
| [symbol] | 2.5 |
| [symbol] | 2.4 |
| Iigp1 | 2.4 |
| Notum | 2.4 |
| [symbol] | 2.4 |
| Tgtp1 | 2.4 |
| [symbol] | 2.4 |
| Irx2 | 2.3 |
| Tmem200a | 2.3 |
| [symbol] | 2.3 |
| Klhdc8a | 2.3 |
| Fst | 2.3 |
| Trpm6 | 2.3 |
| Syt12 | 2.3 |
| [symbol] | 2.3 |
| Cntnap4 | 2.3 |
| [symbol] | 2.3 |
| [symbol] | 2.3 |
| Prkg2 | 2.2 |
| Batf2 | 2.2 |
| Nppb | 2.2 |
| [symbol] | 2.2 |
| Dio2 | 2.2 |
| Bdnf | 2.2 |
| Itgb6 | 2.2 |
| Ar | 2.2 |
| Tgtp2 | 2.2 |
| Tnni2 | 2.2 |
| Styk1 | 2.1 |
| H19 | 2.1 |
| Rpl39l | 2.1 |
| Inhba | 2.1 |
| Zfp985 | 2.1 |
| S100a7a | 2.1 |
| Olfr56 | 2.1 |
| Gib4 | 2.1 |
| [symbol] | 2.1 |
| Ankrd1 | 2.1 |
| Rab27b | 2.0 |
| Klf5 | 2.0 |
| Eps8l2 | 2.0 |
| Epb4114a | 2.0 |
| Pak3 | 2.0 |
| [symbol] | 2.0 |
| Itgbl1 | 2.0 |
| Serpina3g | 2.0 |
| Itih2 | 2.0 |
| [symbol] | 2.0 |
| Phex | 2.0 |
| Hal | 2.0 |
| Clcf1 | 2.0 |
| [symbol] | 2.0 |
| Fam26f | 2.0 |
| Trbc1 | 2.0 |
| Il34 | 2.0 |
| [symbol] | 2.0 |
| Grem1 | 2.0 |
| Btc | 2.0 |
| Sox9 | 2.0 |
| Klf4 | 1.9 |
| Pi15 | 1.9 |
| Slit2 | 1.9 |
| Gprc5a | 1.9 |
| [symbol] | 1.9 |
| [symbol] | 1.9 |
| Mgp | 1.9 |

TABLE 12.7.2.3
Suitable biomarkers based on genes with largest fold changes between
responders and non-responders based on large untreated tumors
(500 mm³ and 1000 mm³). Expression of granzymes & other immune
cell markers is higher in responders than non-responder models.
Biomarker derived from genes in italics/bold are particularly preferred.

| Gene | Log-fold change |
|---|---|
| Foxg1 | 4.6 |
| Msln | 4.5 |
| Zfpm2 | 4.3 |
| Klk10 | 4.2 |
| Dynap | 4.0 |
| Ar | 3.8 |
| Fst | 3.6 |
| Syt8 | 3.5 |
| Hectd2 | 3.4 |
| Pi15 | 3.4 |
| Foxd1 | 3.4 |
| [symbol] | 3.3 |
| Zic5 | 3.2 |
| Igf2 | 3.1 |
| [symbol] | 3.1 |
| Itgbl1 | 3.1 |
| Tmem200a | 3.1 |
| Dio2 | 3.0 |
| [symbol] | 3.0 |
| Aldh3a1 | 3.0 |
| Scara3 | 3.0 |
| [symbol] | 2.9 |
| Brinp3 | 2.9 |
| Pcdhgb1 | 2.9 |
| Itgb4 | 2.9 |
| Rarres1 | 2.9 |
| Den | 2.9 |
| Osr1 | 2.8 |
| Inhba | 2.8 |
| Greb11 | 2.8 |
| Bdnf | 2.8 |
| Wnt10a | 2.7 |
| Prkg2 | 2.7 |
| Slc24a3 | 2.7 |
| Ptgs2 | 2.7 |
| Arsj | 2.7 |
| Itgb8 | 2.7 |
| Sh3rf3 | 2.7 |
| Medag | 2.7 |
| Tnni2 | 2.7 |
| Cntnap4 | 2.7 |
| Sema3a | 2.6 |
| Ptgs2os2 | 2.6 |
| Anxa8 | 2.6 |
| Rp1391 | 2.6 |
| Pcdh19 | 2.6 |
| Ltbp1 | 2.6 |
| [symbol] | 2.5 |
| Sorcs2 | 2.5 |
| [symbol] | 2.5 |
| Prrx2 | 2.5 |
| Lefl | 2.5 |
| Ighg1 | 2.5 |
| Chrna1 | 2.5 |
| Ighg2b | 2.5 |
| Omd | 2.5 |
| Sema3c | 2.5 |
| Epb4114a | 2.5 |
| [symbol] | 2.5 |
| Ngef | 2.5 |
| Trp63 | 2.4 |
| Klhdc8a | 2.4 |
| Slurp1 | 2.4 |
| Tpsab1 | 2.4 |
| Pdx1 | 2.4 |
| Pdgfra | 2.4 |
| Dkk2 | 2.4 |
| Cavin4 | 2.4 |
| Kcnu1 | 2.4 |
| Xlr | 2.4 |
| Cdh17 | 2.3 |
| Ighg3 | 2.3 |
| Aicda | 2.3 |
| Lhx2 | 2.3 |
| Dpep1 | 2.3 |
| Lancl3 | 2.3 |
| Ereg | 2.2 |
| Foxa1 | 2.2 |
| Ighg2c | 2.2 |
| Dmrta1 | 2.2 |
| Cavin2 | 2.2 |
| Grem1 | 2.2 |
| Fam83f | 2.2 |
| Pak3 | 2.2 |
| H19 | 2.2 |
| Slit2 | 2.2 |
| Bmp4 | 2.1 |
| Grin2d | 2.1 |
| Ifi202b | 2.1 |
| Kirrel3 | 2.1 |
| Podnl1 | 2.1 |
| [symbol] | 2.1 |
| Lgals7 | 2.1 |
| [symbol] | 2.1 |
| [symbol] | 2.1 |
| Cdy12 | 2.1 |
| Fas | 2.0 |
| Klk4 | 2.0 |
| Sema5a | 2.0 |
| Lrch2 | 2.0 |
| Fam189a1 | 2.0 |
| [symbol] | 2.0 |
| Shank1 | 2.0 |
| Dsc2 | 2.0 |
| Gpm6b | 2.0 |
| Slc12a1 | 2.0 |
| Plut | 2.0 |
| [symbol] | 2.0 |
| Prelp | 2.0 |
| [symbol] | 2.0 |
| Rnf165 | 2.0 |
| Syt12 | 2.0 |
| Btc | 2.0 |
| Tssk6 | 2.0 |
| Slit3 | 2.0 |
| Gcsam | 2.0 |
| [symbol] | 2.0 |
| Sybu | 2.0 |
| Mrgprf | 2.0 |
| Irx2 | 2.0 |

### Example 12.8: Altered mRNA Expression in Syngeneic Tumor Models after Administration of Anti-CCR8 Antibody

[2024] For each syngeneic tumor model, 10 mice treated with anti-CCR8 antibody TPP-14099 and 10 mice treated with isotype control were sacrificed 24 h past final treatment. Tumors were cut into small pieces and immersed in RNAlater at 4° C. Poly-A mRNA was extracted and cDNA libraries were generated according to Illumina's Hi-seq protocol for subsequent RNA-sequencing. Samples were sequenced to a depth of ˜40 million 150 bp long paired end reads/sample.

[2025] FIGS. 63 to 73 show the impact of treatment with either isotype control (TPP-9809) or anti-CCR8 antibody (TPP-14099) on the mRNA expression levels of different immune cell markers in different syngeneic tumor models. The treatment increased inflammation marker lfng, macrophage markers Ms4a7, Acod1 and Mrc1, cytotoxic T cell markers Cd8a and Cd8b1, Natural killer (NK) cell marker Ncr1, pan T cell markers Cd3e/d/g and B cell markers Cd19 and Cd22.

[2026] Remarkably, the inventors observed significant induction of LTta/b as well as Cxcr5 and its ligand Cxcl13 in the CT26, MBT2 and H22 tumor models, as well as a general upregulation of these genes in several other models including RM1, Hepa1-6, and 4T1. Without being bound by theory, an induction of tertiary lymphoid structures by anti-CCR8 antibody TPP-14099 or TPP-15285 may contribute to the anti-tumor response elicited by these antibodies.

TABLE 12.8.1
Anti-correlation of T cell marker, checkpoint proteins, Treg markers, NK cell marker,
macrophage marker, B cell marker and interferon gamma with anti-CCR8 antibody treatment response.

| | | | Cd274 | Pdcd1 | | | | | | | | |
|---|---|---|---|---|---|---|---|---|---|---|---|---|
| | | Cd8a | [PD-L1] | [PD-1] | Ctla4 | Ccr4 | Ccr8 | Foxp3 | Ncr1 | Ms47 | Fcgr2b | Ifng |
| CT26 | r | −0.693 | −0.630 | −0.600 | −0.654 | −0.612 | −0.664 | −0.531 | −0.775 | −0.626 | −0.496 | −0.606 |
| | pvalue | 0.026 | 0.051 | 0.067 | 0.040 | 0.060 | 0.036 | 0.114 | 0.008 | 0.053 | 0.145 | 0.063 |
| H22 | r | −0.791 | −0.782 | −0.852 | −0.804 | −0.779 | −0.888 | −0.828 | −0.738 | −0.686 | −0.710 | −0.896 |
| | pvalue | 0.011 | 0.013 | 0.004 | 0.009 | 0.013 | 0.001 | 0.006 | 0.023 | 0.041 | 0.032 | 0.001 |

### Example 13: Preparation of Targeted Thorium Conjugate (TTC) Comprising Anti-CCR8 Antibodies

[2027] The disclosure of WO2016096843 is incorporated herein by reference in its entirety and in particular with regard to the production of the conjugates as described in this example.

[2028] Conjugation of the 3,2-hydroxypiridonone (3,2-HOPO) chelator or any other suitable chelator to the antibodies TPP-23411, TPP-21360 or any other anti-CCR8 antibodies described can be conducted as previously described in patent application WO2016096843. Briefly, to activate the chelator, the 3,2-HOPO chelator, dissolved in DMA at a 1:1 ratio with, 0.1 M MES buffer pH 5.4, NHS and EDC, both dissolved in 0.1 M MES buffer pH 5.4, is mixed at a ratio of 1/1/3. For conjugation to the antibodies, a molar ratio of 7.5/7.5/22.5/1 (chelator/NHS/EDC/mAb) of the activated chelator can be charged to mAb. After 20-60 min, the reaction is quenched with, 12% v/v 0.3 M citric acid to adjust pH to 5.5. The protein concentration is determined by HPLC, integrating the peak area at an absorbance of 280 nm. The solution is then buffer exchanged into 30 mM Citrate, 50 mg/mlx M sucrose, 2 mM EDTA, 0.5 mg/ml pABA, pH 5.5 by Tangential Flow Filtration (TFF) at constant volume. At the end of the diafiltration, the solution is discharged to a formulation container. The product is formulated with TFF buffer (30 mM Citrate, x 50 mg/ml M Sucrose, 2 mM EDTA, 0.5 mg/ml pABA, pH 5.5) and 7% w/v polysorbate 80 to obtain 2.5 mg/ml of respective CCR8 antibody-chelator conjugates (CCR8-ACCs). CCR8-ACCs can be filtered through a 0.2 μm filter into sterile vials.

[2029] CCR8-ACCs are radiolabeled with thorium-227 as described in WO2016096843. Briefly, 5 μl of CCR8-ACCs are mixed with, 32 μl of thorium-227 (activity of 3.875 MBq/ml) and 13 μl of citrate buffer, resulting in CCR8-targeted thorium-227 conjugates (CCR8-TTCs) at specific activities of 10 kBq/μg. The sample can be incubated for 60 min at room temperature to allow for stable radiolabeling of thorium-227 into the 3,2-HOPO chelator. An aliquot of the sample can be analyzed by instant thin layer chromatography (iTLC).

ANTIBODY SEQUENCES

| SEQ | |
|---|---|
| ID | Sequence |
| 201 | EVQLLESGGGLVQPGGSLRLSCAASGFTFSSYGMHWVRQAPGKGLEWVSAISGSGGS |
| | TYYADSVKGRFTISRDNSKNTLYLQMNSLRAEDTAVYYCARGRQLGSWGQGTLVTVS |
| | S |
| 202 | SYGMH |
| 203 | AISGSGGSTYYADSVKG |
| 204 | GRQLGS |
| 205 | QSVLTQPPSASGTPGQRVTISCSGSSSNIGSNYVYWYQQLPGTAPKLLIYGNNNRPSGV |
| | PDRFSGSKSGTSASLAISGLRSEDEADYYCAAWDDSLNGWVFGGGTKLTVL |
| 206 | SGSSSNIGSNYVY |
| 207 | GNNNRPS |
| 208 | AAWDDSLNGWV |
| 209 | GAAGTTCAGCTGCTGGAATCTGGCGGCGGACTGGTTCAACCTGGCGGATCTCTGAG |
| | ACTGAGCTGTGCCGCCAGCGGCTTCACCTTTAGCAGCTATGGCATGCACTGGGTCC |
| | GACAGGCCCCTGGCAAAGGACTTGAATGGGTGTCCGCCATCTCTGGCAGCGGCGG |
| | CAGCACATATTACGCCGATTCTGTGAAGGGCAGATTCACCATCAGCCGGGACAAC |
| | AGCAAGAACACCCTGTACCTGCAGATGAACAGCCTGAGAGCCGAGGACACCGCCG |
| | TGTACTATTGTGCCAGAGGCAGACAGCTCGGCTCTTGGGGACAGGGAACACTGGTT |
| | ACAGTGTCCTCA |
| 210 | CAGTCTGTTCTGACACAGCCTCCTAGCGCCTCTGGCACACCTGGACAGAGAGTGAC |
| | CATCAGCTGTAGCGGCAGCAGCTCCAACATCGGCAGCAACTACGTGTACTGGTATC |
| | AGCAGCTGCCCGGCACAGCCCCTAAACTGCTGATCTACGGCAACAACAACAGACC |
| | CAGCGGCGTGCCCGATAGATTCAGCGGCTCTAAGTCTGGCACAAGCGCCAGCCTG |
| | GCCATCTCTGGACTGAGATCTGAGGACGAGGCCGACTACTATTGCGCCGCCTGGGA |
| | CGATTCTCTGAACGGCTGGGTTTTCGGCGGAGGCACCAAACTGACAGTGCTA |
| 211 | EVQLLESGGGLVQPGGSLRLSCAASGFTFSSYGMHWVRQAPGKGLEWVSAISGSGGS |
| | TYYADSVKGRFTISRDNSKNTLYLQMNSLRAEDTAVYYCARGRQLGSWGQGTLVTVS |
| | SASTKGPSVFPLAPSSKSTSGGTAALGCLVKDYFPEPVTVSWNSGALTSGVHTFPAVLQ |
| | SSGLYSLSSVVTVPSSSLGTQTYICNVNHKPSNTKVDKKVEPKSCDKTHTCPPCPAPEL |
| | LGGPSVFLFPPKPKDTLMISRTPEVTCVVVDVSHEDPEVKFNWYVDGVEVHNAKTKPR |
| | EEQYNSTYRVVSVLTVLHQDWLNGKEYKCKVSNKALPAPIEKTISKAKGQPREPQVY |
| | TLPPSRDELTKNQVSLTCLVKGFYPSDIAVEWESNGQPENNYKTTPPVLDSDGSFFLYS |
| | KLTVDKSRWQQGNVFSCSVMHEALHNHYTQKSLSLSPG |
| 212 | QSVLTQPPSASGTPGQRVTISCSGSSSNIGSNYVYWYQQLPGTAPKLLIYGNNNRPSGV |
| | PDRFSGSKSGTSASLAISGLRSEDEADYYCAAWDDSLNGWVFGGGTKLTVLGQPKAA |
| | PSVTLFPPSSEELQANKATLVCLISDFYPGAVTVAWKADSSPVKAGVETTTPSKQSNNK |
| | YAASSYLSLTPEQWKSHRSYSCQVTHEGSTVEKTVAPTECS |
| 213 | GAAGTTCAGCTGCTGGAATCTGGCGGCGGACTGGTTCAACCTGGCGGATCTCTGAG |
| | ACTGAGCTGTGCCGCCAGCGGCTTCACCTTTAGCAGCTATGGCATGCACTGGGTCC |
| | GACAGGCCCCTGGCAAAGGACTTGAATGGGTGTCCGCCATCTCTGGCAGCGGCGG |
| | CAGCACATATTACGCCGATTCTGTGAAGGGCAGATTCACCATCAGCCGGGACAAC |
| | AGCAAGAACACCCTGTACCTGCAGATGAACAGCCTGAGAGCCGAGGACACCGCCG |
| | TGTACTATTGTGCCAGAGGCAGACAGCTCGGCTCTTGGGGACAGGGAACACTGGTT |
| | ACAGTGTCCTCAGCCAGCACCAAGGGCCCCAGCGTGTTCCCTCTGGCCCCTAGCAG |
| | CAAGAGCACATCTGGCGGAACAGCCGCCCTGGGCTGCCTCGTGAAGGACTACTTTC |
| | CCGAGCCCGTGACCGTGTCCTGGAACTCTGGCGCTCTGACAAGCGGCGTGCACACC |
| | TTTCCAGCCGTGCTGCAGAGCAGCGGCCTGTACTCTCTGAGCAGCGTCGTGACAGT |
| | GCCCAGCAGCTCTCTGGGCACCCAGACCTACATCTGCAACGTGAACCACAAGCCC |
| | AGCAACACCAAGGTGGACAAGAAGGTGGAACCCAAGAGCTGCGACAAGACCCAC |
| | ACCTGTCCCCCTTGTCCTGCCCCCGAACTGCTGGGAGGCCCTTCCGTGTTCCTGTTC |
| | CCCCCAAAGCCCAAGGACACCCTGATGATCAGCCGGACCCCCGAAGTGACCTGCG |
| | TGGTGGTGGATGTGTCCCACGAGGACCCTGAAGTGAAGTTCAATTGGTACGTGGAC |
| | GGCGTGGAAGTGCACAACGCCAAGACCAAGCCTAGAGAGGAACAGTACAACAGC |
| | ACCTACCGGGTGGTGTCCGTGCTGACAGTGCTGCACCAGGACTGGCTGAACGGCA |
| | AAGAGTACAAGTGCAAGGTGTCCAACAAGGCCCTGCCTGCCCCCATCGAGAAAAC |
| | CATCAGCAAGGCCAAGGGCCAGCCCCGCGAACCCCAGGTGTACACACTGCCCCCA |
| | AGCAGGGACGAGCTGACCAAGAACCAGGTGTCCCTGACCTGTCTCGTGAAAGGCT |
| | TCTACCCCTCCGATATCGCCGTGGAATGGGAGAGCAACGGCCAGCCCGAGAACAA |
| | CTACAAGACCACCCCCCCTGTGCTGGACAGCGACGGCTCATTCTTCCTGTACAGCA |
| | AGCTGACCGTGGACAAGTCCCGGTGGCAGCAGGGCAACGTGTTCAGCTGCAGCGT |
| | GATGCACGAGGCCCTGCACAACCACTACACCCAGAAGTCCCTGAGCCTGAGCCCT |
| | GGC |
| 214 | CAGTCTGTTCTGACACAGCCTCCTAGCGCCTCTGGCACACCTGGACAGAGAGTGAC |
| | CATCAGCTGTAGCGGCAGCAGCTCCAACATCGGCAGCAACTACGTGTACTGGTATC |
| | AGCAGCTGCCCGGCACAGCCCCTAAACTGCTGATCTACGGCAACAACAACAGACC |
| | CAGCGGCGTGCCCGATAGATTCAGCGGCTCTAAGTCTGGCACAAGCGCCAGCCTG |
| | GCCATCTCTGGACTGAGATCTGAGGACGAGGCCGACTACTATTGCGCCGCCTGGGA |
| | CGATTCTCTGAACGGCTGGGTTTTCGGCGGAGGCACCAAACTGACAGTGCTAGGCC |
| | AGCCTAAAGCCGCCCCTAGCGTGACCCTGTTCCCTCCAAGCAGCGAGGAACTGCA |
| | GGCCAACAAGGCCACCCTCGTGTGCCTGATCAGCGACTTCTATCCTGGCGCCGTGA |
| | CCGTGGCCTGGAAGGCCGATAGCTCTCCTGTGAAGGCCGGCGTGGAAACCACCAC |
| | CCCTAGCAAGCAGAGCAACAACAAATACGCCGCCAGCAGCTACCTGAGCCTGACC |
| | CCCGAGCAGTGGAAGTCCCACAGATCCTACAGCTGCCAAGTGACCCACGAGGGCA |
| | GCACCGTGGAAAAGACAGTGGCCCCTACCGAGTGCAGC |
| 215 | EVQLLESGGGLVQPGGSLRLSCAASGFTFSDYGVHWVRQAPGKGLEWVSGVSWNGS |
| | RTHYADSVKGRFTISRDNSKNTLYLQMNSLRAEDTAVYYCVTRGAWGQGTLVTVSS |
| 216 | DYGVH |
| 217 | GVSWNGSRTHYADSVKG |
| 218 | RGA |
| 219 | QSVLTQPPSASGTPGQRVTISCSGSSFNIGSHFVYWYQQLPGTAPKLLIYKNNQRPSGVP |
| | DRFSGSKSGTSASLAISGLRSEDEADYYCAAWDDSLNGPVFGGGTKLTVL |
| 220 | SGSSFNIGSHFVY |
| 221 | KNNQRPS |
| 222 | AAWDDSLNGPV |
| 223 | GAAGTTCAGCTGCTGGAATCTGGCGGCGGACTGGTTCAACCTGGCGGATCTCTGAG |
| | ACTGAGCTGTGCCGCCAGCGGCTTCACCTTTAGCGATTATGGCGTGCACTGGGTCC |
| | GACAGGCCCCTGGAAAAGGACTGGAATGGGTTTCAGGCGTGTCCTGGAACGGCAG |
| | CAGAACCCACTATGCCGACAGCGTGAAGGGCAGATTCACCATCAGCCGGGACAAC |
| | AGCAAGAACACCCTGTACCTGCAGATGAACAGCCTGAGAGCCGAGGACACCGCCG |
| | TGTACTACTGTGTGACAAGAGGCGCTTGGGGCCAGGGCACACTGGTCACAGTTTCT |
| | TCA |
| 224 | CAGTCTGTTCTGACACAGCCTCCTAGCGCCTCTGGCACACCTGGACAGAGAGTGAC |
| | CATCAGCTGTAGCGGCAGCAGCTTCAACATCGGCAGCCACTTCGTGTACTGGTATC |
| | AGCAGCTGCCTGGCACAGCCCCTAAACTGCTGATCTACAAGAACAACCAGCGGCC |
| | TAGCGGCGTGCCCGATAGATTTTCTGGCAGCAAGAGCGGCACAAGCGCCAGCCTG |
| | GCTATCTCTGGACTGAGATCTGAGGACGAGGCCGACTACTATTGCGCCGCCTGGGA |
| | CGATTCTCTGAACGGCCCTGTTTTTGGCGGAGGCACCAAGCTGACAGTGCTA |
| 225 | EVQLLESGGGLVQPGGSLRLSCAASGFTFSDYGVHWVRQAPGKGLEWVSGVSWNGS |
| | RTHYADSVKGRFTISRDNSKNTLYLQMNSLRAEDTAVYYCVTRGAWGQGTLVTVSSA |
| | STKGPSVFPLAPSSKSTSGGTAALGCLVKDYFPEPVTVSWNSGALTSGVHTFPAVLQSS |
| | GLYSLSSVVTVPSSSLGTQTYICNVNHKPSNTKVDKKVEPKSCDKTHTCPPCPAPELLG |
| | GPSVFLFPPKPKDTLMISRTPEVTCVVVDVSHEDPEVKFNWYVDGVEVHNAKTKPREE |
| | QYNSTYRVVSVLTVLHQDWLNGKEYKCKVSNKALPAPIEKTISKAKGQPREPQVYTLP |
| | PSRDELTKNQVSLTCLVKGFYPSDIAVEWESNGQPENNYKTTPPVLDSDGSFFLYSKLT |
| | VDKSRWQQGNVFSCSVMHEALHNHYTQKSLSLSPG |
| 226 | QSVLTQPPSASGTPGQRVTISCSGSSFNIGSHFVYWYQQLPGTAPKLLIYKNNQRPSGVP |
| | DRFSGSKSGTSASLAISGLRSEDEADYYCAAWDDSLNGPVFGGGTKLTVLGQPKAAPS |
| | VTLFPPSSEELQANKATLVCLISDFYPGAVTVAWKADSSPVKAGVETTTPSKQSNNKY |
| | AASSYLSLTPEQWKSHRSYSCQVTHEGSTVEKTVAPTECS |
| 227 | GAAGTTCAGCTGCTGGAATCTGGCGGCGGACTGGTTCAACCTGGCGGATCTCTGAG |
| | ACTGAGCTGTGCCGCCAGCGGCTTCACCTTTAGCGATTATGGCGTGCACTGGGTCC |
| | GACAGGCCCCTGGAAAAGGACTGGAATGGGTTTCAGGCGTGTCCTGGAACGGCAG |
| | CAGAACCCACTATGCCGACAGCGTGAAGGGCAGATTCACCATCAGCCGGGACAAC |
| | AGCAAGAACACCCTGTACCTGCAGATGAACAGCCTGAGAGCCGAGGACACCGCCG |
| | TGTACTACTGTGTGACAAGAGGCGCTTGGGGCCAGGGCACACTGGTCACAGTTTCT |
| | TCAGCCAGCACCAAGGGCCCCAGCGTGTTCCCTCTGGCCCCTAGCAGCAAGAGCA |
| | CATCTGGCGGAACAGCCGCCCTGGGCTGCCTCGTGAAGGACTACTTTCCCGAGCCC |
| | GTGACCGTGTCCTGGAACTCTGGCGCTCTGACAAGCGGCGTGCACACCTTTCCAGC |
| | CGTGCTGCAGAGCAGCGGCCTGTACTCTCTGAGCAGCGTCGTGACAGTGCCCAGCA |
| | GCTCTCTGGGCACCCAGACCTACATCTGCAACGTGAACCACAAGCCCAGCAACAC |
| | CAAGGTGGACAAGAAGGTGGAACCCAAGAGCTGCGACAAGACCCACACCTGTCCC |
| | CCTTGTCCTGCCCCCGAACTGCTGGGAGGCCCTTCCGTGTTCCTGTTCCCCCCAAAG |
| | CCCAAGGACACCCTGATGATCAGCCGGACCCCCGAAGTGACCTGCGTGGTGGTGG |
| | ATGTGTCCCACGAGGACCCTGAAGTGAAGTTCAATTGGTACGTGGACGGCGTGGA |
| | AGTGCACAACGCCAAGACCAAGCCTAGAGAGGAACAGTACAACAGCACCTACCGG |
| | GTGGTGTCCGTGCTGACAGTGCTGCACCAGGACTGGCTGAACGGCAAAGAGTACA |
| | AGTGCAAGGTGTCCAACAAGGCCCTGCCTGCCCCCATCGAGAAAACCATCAGCAA |
| | GGCCAAGGGCCAGCCCCGCGAACCCCAGGTGTACACACTGCCCCCAAGCAGGGAC |
| | GAGCTGACCAAGAACCAGGTGTCCCTGACCTGTCTCGTGAAAGGCTTCTACCCCTC |
| | CGATATCGCCGTGGAATGGGAGAGCAACGGCCAGCCCGAGAACAACTACAAGACC |
| | ACCCCCCCTGTGCTGGACAGCGACGGCTCATTCTTCCTGTACAGCAAGCTGACCGT |
| | GGACAAGTCCCGGTGGCAGCAGGGCAACGTGTTCAGCTGCAGCGTGATGCACGAG |
| | GCCCTGCACAACCACTACACCCAGAAGTCCCTGAGCCTGAGCCCTGGC |
| 228 | CAGTCTGTTCTGACACAGCCTCCTAGCGCCTCTGGCACACCTGGACAGAGAGTGAC |
| | CATCAGCTGTAGCGGCAGCAGCTTCAACATCGGCAGCCACTTCGTGTACTGGTATC |
| | AGCAGCTGCCTGGCACAGCCCCTAAACTGCTGATCTACAAGAACAACCAGCGGCC |
| | TAGCGGCGTGCCCGATAGATTTTCTGGCAGCAAGAGCGGCACAAGCGCCAGCCTG |
| | GCTATCTCTGGACTGAGATCTGAGGACGAGGCCGACTACTATTGCGCCGCCTGGGA |
| | CGATTCTCTGAACGGCCCTGTTTTTGGCGGAGGCACCAAGCTGACAGTGCTAGGCC |
| | AGCCTAAAGCCGCCCCTAGCGTGACCCTGTTCCCTCCAAGCAGCGAGGAACTGCA |
| | GGCCAACAAGGCCACCCTCGTGTGCCTGATCAGCGACTTCTATCCTGGCGCCGTGA |
| | CCGTGGCCTGGAAGGCCGATAGCTCTCCTGTGAAGGCCGGCGTGGAAACCACCAC |
| | CCCTAGCAAGCAGAGCAACAACAAATACGCCGCCAGCAGCTACCTGAGCCTGACC |
| | CCCGAGCAGTGGAAGTCCCACAGATCCTACAGCTGCCAAGTGACCCACGAGGGCA |
| | GCACCGTGGAAAAGACAGTGGCCCCTACCGAGTGCAGC |
| 229 | EVQLLESGGGLVQPGGSLRLSCAASGFTFSDYGVHWVRQAPGKGLEWVSGVSWNGS |
| | RTHYADSVKGRFTISRDNSKNTLYLQMNSLRAEDTAVYYCVTRGAWGQGTLVTVSS |
| 230 | DYGVH |
| 231 | GVSWNGSRTHYADSVKG |
| 232 | RGA |
| 233 | QSVLTQPPSASGTPGQRVTISCSGSSFNIGSHFVYWYQQLPGTAPKLLIYKNNQRPSGVP |
| | DRFSGSKSGTSASLAISGLRSEDEADYYCAAWDDSLNGPVFGGGTKLTVL |
| 234 | SGSSFNIGSHFVY |
| 235 | KNNQRPS |
| 236 | AAWDDSLNGPV |
| 237 | GAAGTTCAGCTGCTGGAATCTGGCGGCGGACTGGTTCAACCTGGCGGATCTCTGAG |
| | ACTGAGCTGTGCCGCCAGCGGCTTCACCTTTAGCGATTATGGCGTGCACTGGGTCC |
| | GACAGGCCCCTGGAAAAGGACTGGAATGGGTTTCAGGCGTGTCCTGGAACGGCAG |
| | CAGAACCCACTATGCCGACAGCGTGAAGGGCAGATTCACCATCAGCCGGGACAAC |
| | AGCAAGAACACCCTGTACCTGCAGATGAACAGCCTGAGAGCCGAGGACACCGCCG |
| | TGTACTACTGTGTGACAAGAGGCGCTTGGGGCCAGGGCACACTGGTCACAGTTTCT |
| | TCA |
| 238 | CAGTCTGTTCTGACACAGCCTCCTAGCGCCTCTGGCACACCTGGACAGAGAGTGAC |
| | CATCAGCTGTAGCGGCAGCAGCTTCAACATCGGCAGCCACTTCGTGTACTGGTATC |
| | AGCAGCTGCCTGGCACAGCCCCTAAACTGCTGATCTACAAGAACAACCAGCGGCC |
| | TAGCGGCGTGCCCGATAGATTTTCTGGCAGCAAGAGCGGCACAAGCGCCAGCCTG |
| | GCTATCTCTGGACTGAGATCTGAGGACGAGGCCGACTACTATTGCGCCGCCTGGGA |
| | CGATTCTCTGAACGGCCCTGTTTTTGGCGGAGGCACCAAGCTGACAGTGCTA |
| 239 | EVQLLESGGGLVQPGGSLRLSCAASGFTFSDYGVHWVRQAPGKGLEWVSGVSWNGS |
| | RTHYADSVKGRFTISRDNSKNTLYLQMNSLRAEDTAVYYCVTRGAWGQGTLVTVSSA |
| | KTTAPSVYPLAPVCGDTTGSSVTLGCLVKGYFPEPVTLTWNSGSLSSGVHTFPAVLQS |
| | DLYTLSSSVTVTSSTWPSQSITCNVAHPASSTKVDKKIEPRGPTIKPCPPCKCPAPNLLG |
| | GPSVFIFPPKIKDVLMISLSPIVTCVVVDVSEDDPDVQISWFVNNVEVHTAQTQTHRED |
| | YNSTLRVVSALPIQHQDWMSGKEFKCKVNNKDLPAPIERTISKPKGSVRAPQVYVLPP |
| | PEEEMTKKQVTLTCMVTDFMPEDIYVEWTNNGKTELNYKNTEPVLDSDGSYFMYSKL |
| | RVEKKNWVERNSYSCSVVHEGLHNHHTTKSFSRTPGK |
| 240 | QSVLTQPPSASGTPGQRVTISCSGSSFNIGSHFVYWYQQLPGTAPKLLIYKNNQRPSGVP |
| | DRFSGSKSGTSASLAISGLRSEDEADYYCAAWDDSLNGPVFGGGTKLTVLGQPKSSPS |
| | VTLFPPSSEELETNKATLVCTITDFYPGVVTVDWKVDGTPVTQGMETTQPSKQSNNKY |
| | MASSYLTLTARAWERHSSYSCQVTHEGHTVEKSLSRADCS |
| 241 | GAAGTTCAGCTGCTGGAATCTGGCGGCGGACTGGTTCAACCTGGCGGATCTCTGAG |
| | ACTGAGCTGTGCCGCCAGCGGCTTCACCTTTAGCGATTATGGCGTGCACTGGGTCC |
| | GACAGGCCCCTGGAAAAGGACTGGAATGGGTTTCAGGCGTGTCCTGGAACGGCAG |
| | CAGAACCCACTATGCCGACAGCGTGAAGGGCAGATTCACCATCAGCCGGGACAAC |
| | AGCAAGAACACCCTGTACCTGCAGATGAACAGCCTGAGAGCCGAGGACACCGCCG |
| | TGTACTACTGTGTGACAAGAGGCGCTTGGGGCCAGGGCACACTGGTCACAGTTTCT |
| | TCAGCCAAGACCACCGCCCCCAGCGTGTACCCTCTGGCTCCTGTGTGTGGCGATAC |
| | CACCGGCAGCTCTGTGACCCTGGGCTGCCTCGTGAAGGGCTACTTCCCTGAGCCAG |
| | TGACCCTGACCTGGAACAGCGGCTCTCTGTCTAGCGGCGTGCACACCTTTCCAGCC |
| | GTGCTGCAGAGCGACCTGTACACCCTGAGCAGCAGCGTGACCGTGACCAGCAGCA |
| | CATGGCCCAGCCAGAGCATCACCTGTAACGTGGCCCACCCTGCCAGCTCCACCAAG |
| | GTGGACAAGAAGATCGAGCCCAGAGGCCCCACCATCAAGCCTTGCCCCCCTTGCA |
| | AATGCCCTGCCCCCAATCTGCTGGGCGGACCCTCCGTGTTCATCTTCCCACCCAAG |
| | ATCAAGGACGTGCTGATGATCAGCCTGAGCCCCATCGTGACCTGCGTGGTGGTGGA |
| | CGTGTCCGAGGACGACCCCGATGTGCAGATCAGTTGGTTCGTGAACAACGTGGAA |
| | GTGCACACCGCCCAGACCCAGACACACAGAGAGGACTACAACAGCACCCTGAGAG |
| | TGGTGTCCGCCCTGCCCATCCAGCACCAGGATTGGATGAGCGGCAAAGAGTTCAA |
| | GTGCAAAGTGAACAACAAGGACCTGCCAGCCCCCATCGAGCGGACCATCTCTAAG |
| | CCTAAGGGCAGCGTGCGGGCTCCCCAGGTGTACGTGCTGCCTCCTCCAGAGGAAG |
| | AGATGACCAAGAAACAAGTGACACTGACATGCATGGTCACCGACTTCATGCCCGA |
| | GGACATCTACGTGGAATGGACCAACAACGGCAAGACCGAGCTGAACTACAAGAAC |
| | ACCGAGCCCGTGCTGGACAGCGACGGCAGCTACTTCATGTACAGCAAGCTGCGGG |
| | TGGAAAAGAAAAACTGGGTGGAACGGAACAGCTACAGCTGCAGCGTGGTGCACG |
| | AGGGCCTGCACAATCACCACACCACCAAGAGCTTCAGCCGGACCCCTGGCAAG |
| 242 | CAGTCTGTTCTGACACAGCCTCCTAGCGCCTCTGGCACACCTGGACAGAGAGTGAC |
| | CATCAGCTGTAGCGGCAGCAGCTTCAACATCGGCAGCCACTTCGTGTACTGGTATC |
| | AGCAGCTGCCTGGCACAGCCCCTAAACTGCTGATCTACAAGAACAACCAGCGGCC |
| | TAGCGGCGTGCCCGATAGATTTTCTGGCAGCAAGAGCGGCACAAGCGCCAGCCTG |
| | GCTATCTCTGGACTGAGATCTGAGGACGAGGCCGACTACTATTGCGCCGCCTGGGA |
| | CGATTCTCTGAACGGCCCTGTTTTTGGCGGAGGCACCAAGCTGACAGTGCTAGGCC |
| | AGCCCAAGAGCAGCCCTAGCGTGACCCTGTTCCCTCCAAGCAGCGAGGAACTGGA |
| | AACAAACAAGGCCACCCTCGTGTGCACCATCACCGACTTCTACCCCGGCGTCGTGA |
| | CCGTGGACTGGAAGGTGGACGGCACCCCAGTGACCCAGGGCATGGAAACCACCCA |
| | GCCCAGCAAGCAGAGCAACAACAAGTACATGGCCAGCAGCTACCTGACCCTGACC |
| | GCCAGAGCCTGGGAGAGACACAGCTCCTACAGCTGCCAAGTGACCCACGAGGGCC |
| | ACACCGTGGAAAAGAGCCTGAGCAGAGCCGACTGCAGC |
| 243 | EVQLLESGGGLVQPGGSLRLSCAASGFTFSSYGMHWVRQAPGKGLEWVSAISGSGGS |
| | TYYADSVKGRFTISRDNSKNTLYLQMNSLRAEDTAVYYCARGRQLGSWGQGTLVTVS |
| | S |
| 244 | SYGMH |
| 245 | AISGSGGSTYYADSVKG |
| 246 | GRQLGS |
| 247 | QSVLTQPPSASGTPGQRVTISCSGSSSNIGSNYVYWYQQLPGTAPKLLIYGNNNRPSGV |
| | PDRFSGSKSGTSASLAISGLRSEDEADYYCAAWDDSLNGWVFGGGTKLTVL |
| 248 | SGSSSNIGSNYVY |
| 249 | GNNNRPS |
| 250 | AAWDDSLNGWV |
| 251 | GAAGTTCAGCTGCTGGAATCTGGCGGCGGACTGGTTCAACCTGGCGGATCTCTGAG |
| | ACTGAGCTGTGCCGCCAGCGGCTTCACCTTTAGCAGCTATGGCATGCACTGGGTCC |
| | GACAGGCCCCTGGCAAAGGACTTGAATGGGTGTCCGCCATCTCTGGCAGCGGCGG |
| | CAGCACATATTACGCCGATTCTGTGAAGGGCAGATTCACCATCAGCCGGGACAAC |
| | AGCAAGAACACCCTGTACCTGCAGATGAACAGCCTGAGAGCCGAGGACACCGCCG |
| | TGTACTATTGTGCCAGAGGCAGACAGCTCGGCTCTTGGGGACAGGGAACACTGGTT |
| | ACAGTGTCCTCA |
| 252 | CAGTCTGTTCTGACACAGCCTCCTAGCGCCTCTGGCACACCTGGACAGAGAGTGAC |
| | CATCAGCTGTAGCGGCAGCAGCTCCAACATCGGCAGCAACTACGTGTACTGGTATC |
| | AGCAGCTGCCCGGCACAGCCCCTAAACTGCTGATCTACGGCAACAACAACAGACC |
| | CAGCGGCGTGCCCGATAGATTCAGCGGCTCTAAGTCTGGCACAAGCGCCAGCCTG |
| | GCCATCTCTGGACTGAGATCTGAGGACGAGGCCGACTACTATTGCGCCGCCTGGGA |
| | CGATTCTCTGAACGGCTGGGTTTTCGGCGGAGGCACCAAACTGACAGTGCTA |
| 253 | EVQLLESGGGLVQPGGSLRLSCAASGFTFSSYGMHWVRQAPGKGLEWVSAISGSGGS |
| | TYYADSVKGRFTISRDNSKNTLYLQMNSLRAEDTAVYYCARGRQLGSWGQGTLVTVS |
| | SAKTTAPSVYPLAPVCGDTTGSSVTLGCLVKGYFPEPVTLTWNSGSLSSGVHTFPAVL |
| | QSDLYTLSSSVTVTSSTWPSQSITCNVAHPASSTKVDKKIEPRGPTIKPCPPCKCPAPNLL |
| | GGPSVFIFPPKIKDVLMISLSPIVTCVVVDVSEDDPDVQISWFVNNVEVHTAQTQTHRE |
| | DYNSTLRVVSALPIQHQDWMSGKEFKCKVNNKDLPAPIERTISKPKGSVRAPQVYVLP |
| | PPEEEMTKKQVTLTCMVTDFMPEDIYVEWTNNGKTELNYKNTEPVLDSDGSYFMYSK |
| | LRVEKKNWVERNSYSCSVVHEGLHNHHTTKSFSRTPGK |
| 254 | QSVLTQPPSASGTPGQRVTISCSGSSSNIGSNYVYWYQQLPGTAPKLLIYGNNNRPSGV |
| | PDRFSGSKSGTSASLAISGLRSEDEADYYCAAWDDSLNGWVFGGGTKLTVLGQPKSSP |
| | SVTLFPPSSEELETNKATLVCTITDFYPGVVTVDWKVDGTPVTQGMETTQPSKQSNNK |
| | YMASSYLTLTARAWERHSSYSCQVTHEGHTVEKSLSRADCS |
| 255 | GAAGTTCAGCTGCTGGAATCTGGCGGCGGACTGGTTCAACCTGGCGGATCTCTGAG |
| | ACTGAGCTGTGCCGCCAGCGGCTTCACCTTTAGCAGCTATGGCATGCACTGGGTCC |
| | GACAGGCCCCTGGCAAAGGACTTGAATGGGTGTCCGCCATCTCTGGCAGCGGCGG |
| | CAGCACATATTACGCCGATTCTGTGAAGGGCAGATTCACCATCAGCCGGGACAAC |
| | AGCAAGAACACCCTGTACCTGCAGATGAACAGCCTGAGAGCCGAGGACACCGCCG |
| | TGTACTATTGTGCCAGAGGCAGACAGCTCGGCTCTTGGGGACAGGGAACACTGGTT |
| | ACAGTGTCCTCAGCCAAGACCACCGCCCCCAGCGTGTACCCTCTGGCTCCTGTGTG |
| | TGGCGATACCACCGGCAGCTCTGTGACCCTGGGCTGCCTCGTGAAGGGCTACTTCC |
| | CTGAGCCAGTGACCCTGACCTGGAACAGCGGCTCTCTGTCTAGCGGCGTGCACACC |
| | TTTCCAGCCGTGCTGCAGAGCGACCTGTACACCCTGAGCAGCAGCGTGACCGTGAC |
| | CAGCAGCACATGGCCCAGCCAGAGCATCACCTGTAACGTGGCCCACCCTGCCAGC |
| | TCCACCAAGGTGGACAAGAAGATCGAGCCCAGAGGCCCCACCATCAAGCCTTGCC |
| | CCCCTTGCAAATGCCCTGCCCCCAATCTGCTGGGCGGACCCTCCGTGTTCATCTTCC |
| | CACCCAAGATCAAGGACGTGCTGATGATCAGCCTGAGCCCCATCGTGACCTGCGTG |
| | GTGGTGGACGTGTCCGAGGACGACCCCGATGTGCAGATCAGTTGGTTCGTGAACA |
| | ACGTGGAAGTGCACACCGCCCAGACCCAGACACACAGAGAGGACTACAACAGCAC |
| | CCTGAGAGTGGTGTCCGCCCTGCCCATCCAGCACCAGGATTGGATGAGCGGCAAA |
| | GAGTTCAAGTGCAAAGTGAACAACAAGGACCTGCCAGCCCCCATCGAGCGGACCA |
| | TCTCTAAGCCTAAGGGCAGCGTGCGGGCTCCCCAGGTGTACGTGCTGCCTCCTCCA |
| | GAGGAAGAGATGACCAAGAAACAAGTGACACTGACATGCATGGTCACCGACTTCA |
| | TGCCCGAGGACATCTACGTGGAATGGACCAACAACGGCAAGACCGAGCTGAACTA |
| | CAAGAACACCGAGCCCGTGCTGGACAGCGACGGCAGCTACTTCATGTACAGCAAG |
| | CTGCGGGTGGAAAAGAAAAACTGGGTGGAACGGAACAGCTACAGCTGCAGCGTG |
| | GTGCACGAGGGCCTGCACAATCACCACACCACCAAGAGCTTCAGCCGGACCCCTG |
| | GCAAG |
| 256 | CAGTCTGTTCTGACACAGCCTCCTAGCGCCTCTGGCACACCTGGACAGAGAGTGAC |
| | CATCAGCTGTAGCGGCAGCAGCTCCAACATCGGCAGCAACTACGTGTACTGGTATC |
| | AGCAGCTGCCCGGCACAGCCCCTAAACTGCTGATCTACGGCAACAACAACAGACC |
| | CAGCGGCGTGCCCGATAGATTCAGCGGCTCTAAGTCTGGCACAAGCGCCAGCCTG |
| | GCCATCTCTGGACTGAGATCTGAGGACGAGGCCGACTACTATTGCGCCGCCTGGGA |
| | CGATTCTCTGAACGGCTGGGTTTTCGGCGGAGGCACCAAACTGACAGTGCTAGGCC |
| | AGCCCAAGAGCAGCCCTAGCGTGACCCTGTTCCCTCCAAGCAGCGAGGAACTGGA |
| | AACAAACAAGGCCACCCTCGTGTGCACCATCACCGACTTCTACCCCGGCGTCGTGA |
| | CCGTGGACTGGAAGGTGGACGGCACCCCAGTGACCCAGGGCATGGAAACCACCCA |
| | GCCCAGCAAGCAGAGCAACAACAAGTACATGGCCAGCAGCTACCTGACCCTGACC |
| | GCCAGAGCCTGGGAGAGACACAGCTCCTACAGCTGCCAAGTGACCCACGAGGGCC |
| | ACACCGTGGAAAAGAGCCTGAGCAGAGCCGACTGCAGC |
| 257 | EVQLLESGGGLVQPGGSLRLSCAASGFTFSSYSMNWVRQAPGKGLEWVSGVSWAGSR |
| | THYADSVKGRFTISRDNSKNTLYLQMNSLRAEDTAVYYCARAAAGTRGFDYWGQGT |
| | LVTVSS |
| 258 | SYSMN |
| 259 | GVSWAGSRTHYADSVKG |
| 260 | AAAGTRGFDY |
| 261 | QSVLTQPPSASGTPGQRVTISCSGSSSNIGSHIVNWYQQLPGTAPKLLIYGNTNRPSGVP |
| | DRFSGSKSGTSASLAISGLRSEDEADYYCSSYTSISTLVFGGGTKLTVL |
| 262 | SGSSSNIGSHIVN |
| 263 | GNTNRPS |
| 264 | SSYTSISTLV |
| 265 | GAAGTTCAGCTGCTGGAATCTGGCGGCGGACTGGTTCAACCTGGCGGATCTCTGAG |
| | ACTGAGCTGTGCCGCCAGCGGCTTCACCTTTAGCAGCTACAGCATGAACTGGGTCC |
| | GACAGGCCCCTGGCAAAGGCCTTGAATGGGTTTCAGGCGTGTCCTGGGCCGGCAG |
| | CAGAACCCACTATGCCGACAGCGTGAAGGGCAGATTCACCATCAGCCGGGACAAC |
| | AGCAAGAACACCCTGTACCTGCAGATGAACAGCCTGAGAGCCGAGGACACCGCCG |
| | TGTACTATTGTGCCAGAGCTGCCGCCGGAACCAGAGGCTTTGATTATTGGGGCCAG |
| | GGCACCCTGGTCACCGTTTCTTCA |
| 266 | AGCTACAGCATGAAC |
| 267 | GGCGTGTCCTGGGCCGGCAGCAGAACCCACTATGCCGACAGCGTGAAGGGC |
| 268 | GCTGCCGCCGGAACCAGAGGCTTTGATTAT |
| 269 | CAGTCTGTTCTGACACAGCCTCCTAGCGCCTCTGGCACACCTGGACAGAGAGTGAC |
| | CATCAGCTGTAGCGGCAGCAGCTCCAATATCGGCAGCCACATCGTGAACTGGTATC |
| | AGCAGCTGCCTGGCACAGCCCCTAAACTGCTGATCTACGGCAACACCAACAGACC |
| | CAGCGGCGTGCCCGATAGATTTTCCGGCTCTAAGAGCGGCACAAGCGCCAGCCTG |
| | GCTATCTCTGGACTGAGATCTGAGGACGAGGCCGACTACTACTGCAGCAGCTACAC |
| | CAGCATCAGCACCCTGGTTTTTGGCGGAGGCACCAAGCTGACAGTGCTA |
| 270 | AGCGGCAGCAGCTCCAATATCGGCAGCCACATCGTGAAC |
| 271 | GGCAACACCAACAGACCCAGC |
| 272 | AGCAGCTACACCAGCATCAGCACCCTGGTT |
| 273 | EVQLLESGGGLVQPGGSLRLSCAASGFTFSSYSMNWVRQAPGKGLEWVSGVSWAGSR |
| | THYADSVKGRFTISRDNSKNTLYLQMNSLRAEDTAVYYCARAAAGTRGFDYWGQGT |
| | LVTVSSASTKGPSVFPLAPSSKSTSGGTAALGCLVKDYFPEPVTVSWNSGALTSGVHTF |
| | PAVLQSSGLYSLSSVVTVPSSSLGTQTYICNVNHKPSNTKVDKKVEPKSCDKTHTCPPC |
| | PAPELLGGPSVFLFPPKPKDTLMISRTPEVTCVVVDVSHEDPEVKFNWYVDGVEVHNA |
| | KTKPREEQYNSTYRVVSVLTVLHQDWLNGKEYKCKVSNKALPAPIEKTISKAKGQPRE |
| | PQVYTLPPSRDELTKNQVSLTCLVKGFYPSDIAVEWESNGQPENNYKTTPPVLDSDGSF |
| | FLYSKLTVDKSRWQQGNVFSCSVMHEALHNHYTQKSLSLSPG |
| 274 | QSVLTQPPSASGTPGQRVTISCSGSSSNIGSHIVNWYQQLPGTAPKLLIYGNTNRPSGVP |
| | DRFSGSKSGTSASLAISGLRSEDEADYYCSSYTSISTLVFGGGTKLTVLGQPKAAPSVTL |
| | FPPSSEELQANKATLVCLISDFYPGAVTVAWKADSSPVKAGVETTTPSKQSNNKYAAS |
| | SYLSLTPEQWKSHRSYSCQVTHEGSTVEKTVAPTECS |
| 275 | EVQLLESGGGLVQPGGSLRLSCAASGFTFRSYAMHWVRQAPGKGLEWVSLISWDGGS |
| | TYYADSVKGRFTISRDNSKNTLYLQMNSLRAEDTAVYYCARGGIGRRPGLEYWGQGT |
| | LVTVSS |
| 276 | SYAMH |
| 277 | LISWDGGSTYYADSVKG |
| 278 | GGIGRRPGLEY |
| 279 | QSVLTQPPSASGTPGQRVTISCSGSSSNIGNNYVSWYQQLPGTAPKLLIYGNSNRPSGVP |
| | DRFSGSKSGTSASLAISGLRSEDEADYYCQTWGTGIRVFGGGTKLTVL |
| 280 | SGSSSNIGNNYVS |
| 281 | GNSNRPS |
| 282 | QTWGTGIRV |
| 283 | GAGGTGCAGCTGTTGGAGTCTGGGGGAGGCTTGGTACAGCCTGGGGGGTCCCTGA |
| | GACTCTCCTGTGCAGCCTCTGGATTCACCTTCAGGAGCTATGCTATGCACTGGGTC |
| | CGCCAGGCTCCAGGCAAGGGGCTGGAGTGGGTCTCTCTTATTAGTTGGGATGGTGG |
| | TAGCACCTACTATGCAGACTCTGTGAAGGGTCGATTCACCATCTCCAGAGACAATT |
| | CCAAGAACACGCTGTATCTGCAAATGAACAGCCTGAGAGCCGAGGACACTGCCGT |
| | GTATTACTGTGCGAGAGGGGGTATAGGGCGTCGTCCTGGGCTTGAGTACTGGGGCC |
| | AAGGTACCCTGGTCACCGTGAGTTCA |
| 284 | AGCTATGCTATGCAC |
| 285 | CTTATTAGTTGGGATGGTGGTAGCACCTACTATGCAGACTCTGTGAAGGGT |
| 286 | GGGGGTATAGGGCGTCGTCCTGGGCTTGAGTAC |
| 287 | CAGTCTGTGCTGACTCAGCCACCCTCAGCGTCTGGGACCCCCGGGCAGAGGGTCAC |
| | CATCTCCTGCTCTGGAAGCAGCTCCAACATTGGAAATAATTATGTTTCCTGGTATC |
| | AGCAGCTCCCAGGAACGGCCCCCAAACTCCTCATCTATGGTAACAGCAATCGGCCC |
| | TCAGGGGTCCCTGACCGATTCTCTGGCTCCAAGTCTGGCACCTCAGCCTCCCTGGC |
| | CATCAGTGGGCTCCGGTCCGAGGATGAGGCTGATTATTACTGTCAGACCTGGGGCA |
| | CTGGCATTCGGGTGTTCGGCGGAGGAACCAAGCTGACGGTCCTA |
| 288 | TCTGGAAGCAGCTCCAACATTGGAAATAATTATGTTTCC |
| 289 | GGTAACAGCAATCGGCCCTCA |
| 290 | CAGACCTGGGGCACTGGCATTCGGGTG |
| 291 | EVQLLESGGGLVQPGGSLRLSCAASGFTFRSYAMHWVRQAPGKGLEWVSLISWDGGS |
| | TYYADSVKGRFTISRDNSKNTLYLQMNSLRAEDTAVYYCARGGIGRRPGLEYWGQGT |
| | LVTVSSASTKGPSVFPLAPSSKSTSGGTAALGCLVKDYFPEPVTVSWNSGALTSGVHTF |
| | PAVLQSSGLYSLSSVVTVPSSSLGTQTYICNVNHKPSNTKVDKKVEPKSCDKTHTCPPC |
| | PAPELLGGPSVFLFPPKPKDTLMISRTPEVTCVVVDVSHEDPEVKFNWYVDGVEVHNA |
| | KTKPREEQYNSTYRVVSVLTVLHQDWLNGKEYKCKVSNKALPAPIEKTISKAKGQPRE |
| | PQVYTLPPSRDELTKNQVSLTCLVKGFYPSDIAVEWESNGQPENNYKTTPPVLDSDGSF |
| | FLYSKLTVDKSRWQQGNVFSCSVMHEALHNHYTQKSLSLSPG |
| 292 | QSVLTQPPSASGTPGQRVTISCSGSSSNIGNNYVSWYQQLPGTAPKLLIYGNSNRPSGVP |
| | DRFSGSKSGTSASLAISGLRSEDEADYYCQTWGTGIRVFGGGTKLTVLGQPKAAPSVT |
| | LFPPSSEELQANKATLVCLISDFYPGAVTVAWKADSSPVKAGVETTTPSKQSNNKYAA |
| | SSYLSLTPEQWKSHRSYSCQVTHEGSTVEKTVAPTECS |
| 293 | EVQLLESGGGLVQPGGSLRLSCAASGFTFSSYAMSWVRQAPGKGLEWVGRIRSKANS |
| | YATAYAASVKGRFTISRDNSKNTLYLQMNSLRAEDTAVYYCTRPLDSWGQGTLVTVS |
| | S |
| 294 | SYAMS |
| 295 | RIRSKANSYATAYAASVKG |
| 296 | PLDS |
| 297 | QSVLTQPPSASGTPGQRVTISCSGSSSNIGNNAVNWYQQLPGTAPKLLIYRNNQRSSGV |
| | PDRFSGSKSGTSASLAISGLRSEDEADYYCQSYDNSLSASVFGGGTKLTVL |
| 298 | SGSSSNIGNNAVN |
| 299 | RNNQRSS |
| 300 | QSYDNSLSASV |
| 301 | GAGGTGCAGCTGTTGGAGTCTGGGGGAGGCTTGGTACAGCCTGGGGGGTCCCTGA |
| | GACTCTCCTGTGCAGCCTCTGGATTCACCTTTAGCAGCTATGCCATGAGCTGGGTC |
| | CGCCAGGCTCCAGGGAAGGGGCTGGAGTGGGTTGGCCGTATTAGAAGCAAAGCTA |
| | ACAGTTACGCGACAGCATATGCTGCGTCGGTGAAAGGCAGGTTCACCATCTCCAG |
| | AGACAATTCCAAGAACACGCTGTATCTGCAAATGAACAGCCTGAGAGCCGAGGAC |
| | ACTGCCGTGTATTACTGTACGAGGCCCTTGGACTCCTGGGGCCAAGGTACCCTGGT |
| | CACCGTGAGTTCA |
| 302 | AGCTATGCCATGAGC |
| 303 | CGTATTAGAAGCAAAGCTAACAGTTACGCGACAGCATATGCTGCGTCGGTGAAAG |
| | GC |
| 304 | CCCTTGGACTCC |
| 305 | CAGTCTGTGCTGACTCAGCCACCCTCAGCGTCTGGGACCCCCGGGCAGAGGGTCAC |
| | CATCTCCTGTTCTGGAAGCAGCTCCAACATCGGAAATAATGCTGTAAACTGGTATC |
| | AGCAGCTCCCAGGAACGGCCCCCAAACTCCTCATCTATAGAAATAATCAGCGGTCC |
| | TCAGGGGTCCCTGACCGATTCTCTGGCTCCAAGTCTGGCACCTCAGCCTCCCTGGC |
| | CATCAGTGGGCTCCGGTCCGAGGATGAGGCTGATTATTACTGCCAGTCCTATGACA |
| | ACAGCCTGAGTGCTTCGGTGTTCGGCGGAGGAACCAAGCTGACGGTCCTA |
| 306 | TCTGGAAGCAGCTCCAACATCGGAAATAATGCTGTAAAC |
| 307 | AGAAATAATCAGCGGTCCTCA |
| 308 | CAGTCCTATGACAACAGCCTGAGTGCTTCGGTG |
| 309 | EVQLLESGGGLVQPGGSLRLSCAASGFTFSSYAMSWVRQAPGKGLEWVGRIRSKANS |
| | YATAYAASVKGRFTISRDNSKNTLYLQMNSLRAEDTAVYYCTRPLDSWGQGTLVTVS |
| | SASTKGPSVFPLAPSSKSTSGGTAALGCLVKDYFPEPVTVSWNSGALTSGVHTFPAVLQ |
| | SSGLYSLSSVVTVPSSSLGTQTYICNVNHKPSNTKVDKKVEPKSCDKTHTCPPCPAPEL |
| | LGGPSVFLFPPKPKDTLMISRTPEVTCVVVDVSHEDPEVKFNWYVDGVEVHNAKTKPR |
| | EEQYNSTYRVVSVLTVLHQDWLNGKEYKCKVSNKALPAPIEKTISKAKGQPREPQVY |
| | TLPPSRDELTKNQVSLTCLVKGFYPSDIAVEWESNGQPENNYKTTPPVLDSDGSFFLYS |
| | KLTVDKSRWQQGNVFSCSVMHEALHNHYTQKSLSLSPG |
| 310 | QSVLTQPPSASGTPGQRVTISCSGSSSNIGNNAVNWYQQLPGTAPKLLIYRNNQRSSGV |
| | PDRFSGSKSGTSASLAISGLRSEDEADYYCQSYDNSLSASVFGGGTKLTVLGQPKAAPS |
| | VTLFPPSSEELQANKATLVCLISDFYPGAVTVAWKADSSPVKAGVETTTPSKQSNNKY |
| | AASSYLSLTPEQWKSHRSYSCQVTHEGSTVEKTVAPTECS |
| 311 | EVQLLESGGGLLQPGGSLRLSCAASGFTFSNAWMSWVRQAPGKGLEWVAVISYDGRN |
| | KYSADSVKGRFTISRDNSKNTLYLQMNSLRAEDTAVYYCARGLPYGYWGQGTLVTVS |
| | S |
| 312 | NAWMS |
| 313 | VISYDGRNKYSADSVKG |
| 314 | GLPYGY |
| 315 | QSVLTQPPSASGTPGQRVTISCSGSSSNIGSNTVNWYQQLPGTAPKLLIYRNNQRPSGVP |
| | DRFSGSKSGTSASLAISGLRSEDEADYYCAAWDDSLKALVFGGGTKLTVL |
| 316 | SGSSSNIGSNTVN |
| 317 | RNNQRPS |
| 318 | AAWDDSLKALV |
| 319 | GAGGTGCAGCTGTTGGAGTCTGGGGGAGGCTTGTTACAGCCTGGGGGGTCCCTGA |
| | GACTCTCCTGTGCAGCCTCTGGATTCACCTTCAGTAACGCCTGGATGAGCTGGGTC |
| | CGCCAGGCTCCAGGGAAGGGGCTGGAGTGGGTGGCAGTTATATCATATGATGGAA |
| | GAAATAAATACTCTGCAGACTCCGTGAAGGGCCGATTCACCATCTCCAGAGACAA |
| | TTCCAAGAACACGCTGTATCTGCAAATGAACAGCCTGAGAGCCGAGGACACTGCC |
| | GTGTATTACTGTGCGAGGGGCCTCCCTTATGGCTACTGGGGCCAAGGTACCCTGGT |
| | CACCGTGAGTTCA |
| 320 | AACGCCTGGATGAGC |
| 321 | GTTATATCATATGATGGAAGAAATAAATACTCTGCAGACTCCGTGAAGGGC |
| 322 | GGCCTCCCTTATGGCTAC |
| 323 | CAGTCTGTGCTGACTCAGCCACCCTCAGCGTCTGGGACCCCCGGGCAGAGGGTCAC |
| | CATCTCTTGTTCTGGAAGCAGCTCCAACATCGGAAGTAATACTGTAAACTGGTATC |
| | AGCAGCTCCCAGGAACGGCCCCCAAACTCCTCATCTATAGGAATAATCAGCGGCC |
| | CTCAGGGGTCCCTGACCGATTCTCTGGCTCCAAGTCTGGCACCTCAGCCTCCCTGG |
| | CCATCAGTGGGCTCCGGTCCGAGGATGAGGCTGATTATTACTGTGCTGCATGGGAT |
| | GACAGTCTGAAGGCTCTGGTATTCGGCGGAGGAACCAAGCTGACGGTCCTA |
| 324 | TCTGGAAGCAGCTCCAACATCGGAAGTAATACTGTAAAC |
| 325 | AGGAATAATCAGCGGCCCTCA |
| 326 | GCTGCATGGGATGACAGTCTGAAGGCTCTGGTA |
| 327 | EVQLLESGGGLLQPGGSLRLSCAASGFTFSNAWMSWVRQAPGKGLEWVAVISYDGRN |
| | KYSADSVKGRFTISRDNSKNTLYLQMNSLRAEDTAVYYCARGLPYGYWGQGTLVTVS |
| | SASTKGPSVFPLAPSSKSTSGGTAALGCLVKDYFPEPVTVSWNSGALTSGVHTFPAVLQ |
| | SSGLYSLSSVVTVPSSSLGTQTYICNVNHKPSNTKVDKKVEPKSCDKTHTCPPCPAPEL |
| | LGGPSVFLFPPKPKDTLMISRTPEVTCVVVDVSHEDPEVKFNWYVDGVEVHNAKTKPR |
| | EEQYNSTYRVVSVLTVLHQDWLNGKEYKCKVSNKALPAPIEKTISKAKGQPREPQVY |
| | TLPPSRDELTKNQVSLTCLVKGFYPSDIAVEWESNGQPENNYKTTPPVLDSDGSFFLYS |
| | KLTVDKSRWQQGNVFSCSVMHEALHNHYTQKSLSLSPG |
| 328 | QSVLTQPPSASGTPGQRVTISCSGSSSNIGSNTVNWYQQLPGTAPKLLIYRNNQRPSGVP |
| | DRFSGSKSGTSASLAISGLRSEDEADYYCAAWDDSLKALVFGGGTKLTVLGQPKAAPS |
| | VTLFPPSSEELQANKATLVCLISDFYPGAVTVAWKADSSPVKAGVETTTPSKQSNNKY |
| | AASSYLSLTPEQWKSHRSYSCQVTHEGSTVEKTVAPTECS |
| 329 | EVQLLESGGGLVQPGGSLRLSCAASGFTFSNAWMSWVRQAPGKGLEWVSGINWNGG |
| | STGYADSVKGRFTISRDNSKNTLYLQMNSLRAEDTAVYYCVRTYSGHYGPYFDNWG |
| | QGTLVTVSS |
| 330 | NAWMS |
| 331 | GINWNGGSTGYADSVKG |
| 332 | TYSGHYGPYFDN |
| 333 | QSVLTQPPSASGTPGQRVTISCSGSSSNIGSHTVNWYQQLPGTAPKLLIYRNNQRPSGVP |
| | DRFSGSKSGTSASLAISGLRSEDEADYYCAAWDDSLNGWVFGGGTKLTVL |
| 334 | SGSSSNIGSHTVN |
| 335 | RNNQRPS |
| 336 | AAWDDSLNGWV |
| 337 | GAGGTGCAGCTGTTGGAGTCTGGGGGAGGCTTGGTACAGCCTGGGGGGTCCCTGA |
| | GACTCTCCTGTGCAGCCTCTGGATTCACCTTCAGTAACGCCTGGATGAGCTGGGTC |
| | CGCCAGGCTCCAGGGAAGGGGCTGGAGTGGGTCTCTGGTATTAATTGGAATGGTG |
| | GTAGCACAGGTTATGCAGACTCTGTGAAGGGCCGATTCACCATCTCCAGAGACAAT |
| | TCCAAGAACACGCTGTATCTGCAAATGAACAGCCTGAGAGCCGAGGACACTGCCG |
| | TGTATTACTGTGTTAGGACGTATAGTGGGCACTACGGACCCTACTTTGACAACTGG |
| | GGCCAAGGTACCCTGGTCACCGTGAGTTCA |
| 338 | AACGCCTGGATGAGC |
| 339 | GGTATTAATTGGAATGGTGGTAGCACAGGTTATGCAGACTCTGTGAAGGGC |
| 340 | ACGTATAGTGGGCACTACGGACCCTACTTTGACAAC |
| 341 | CAGTCTGTGCTGACTCAGCCACCCTCAGCGTCTGGGACCCCCGGGCAGAGGGTCAC |
| | CATCTCTTGTTCTGGAAGCAGCTCCAACATCGGAAGTCATACTGTAAACTGGTATC |
| | AGCAGCTCCCAGGAACGGCCCCCAAACTCCTCATCTATAGGAATAATCAGCGGCC |
| | CTCAGGGGTCCCTGACCGATTCTCTGGCTCCAAGTCTGGCACCTCAGCCTCCCTGG |
| | CCATCAGTGGGCTCCGGTCCGAGGATGAGGCTGATTATTACTGTGCAGCATGGGAT |
| | GACAGCCTGAATGGTTGGGTGTTCGGCGGAGGAACCAAGCTGACGGTCCTA |
| 342 | TCTGGAAGCAGCTCCAACATCGGAAGTCATACTGTAAAC |
| 343 | AGGAATAATCAGCGGCCCTCA |
| 344 | GCAGCATGGGATGACAGCCTGAATGGTTGGGTG |
| 345 | EVQLLESGGGLVQPGGSLRLSCAASGFTFSNAWMSWVRQAPGKGLEWVSGINWNGG |
| | STGYADSVKGRFTISRDNSKNTLYLQMNSLRAEDTAVYYCVRTYSGHYGPYFDNWG |
| | QGTLVTVSSASTKGPSVFPLAPSSKSTSGGTAALGCLVKDYFPEPVTVSWNSGALTSGV |
| | HTFPAVLQSSGLYSLSSVVTVPSSSLGTQTYICNVNHKPSNTKVDKKVEPKSCDKTHTC |
| | PPCPAPELLGGPSVFLFPPKPKDTLMISRTPEVTCVVVDVSHEDPEVKFNWYVDGVEV |
| | HNAKTKPREEQYNSTYRVVSVLTVLHQDWLNGKEYKCKVSNKALPAPIEKTISKAKG |
| | QPREPQVYTLPPSRDELTKNQVSLTCLVKGFYPSDIAVEWESNGQPENNYKTTPPVLDS |
| | DGSFFLYSKLTVDKSRWQQGNVFSCSVMHEALHNHYTQKSLSLSPG |
| 346 | QSVLTQPPSASGTPGQRVTISCSGSSSNIGSHTVNWYQQLPGTAPKLLIYRNNQRPSGVP |
| | DRFSGSKSGTSASLAISGLRSEDEADYYCAAWDDSLNGWVFGGGTKLTVLGQPKAAP |
| | SVTLFPPSSEELQANKATLVCLISDFYPGAVTVAWKADSSPVKAGVETTTPSKQSNNK |
| | YAASSYLSLTPEQWKSHRSYSCQVTHEGSTVEKTVAPTECS |
| 347 | EVQLLESGGGLVQPGGSLRLSCAASGFTFVTYWMTWVRQAPGKGLEWVSGVSWNGS |
| | RTHYVDSVKRRFTISRDNSKNTLYLQMNSLRAEDTAVYYCARYSGYPDYYGMDVWG |
| | QGTLVTVSS |
| 348 | TYWMT |
| 349 | GVSWNGSRTHYVDSVKR |
| 350 | YSGYPDYYGMDV |
| 351 | QSVLTQPPSASGTPGQRVTISCSGSWSNIGNDNVYWYQQLPGTAPKLLIYRNNQRPSG |
| | VPDRFSGSKSGTSASLAISGLRSEDEADYYCQSYDRSLSGSVFGGGTKLTVL |
| 352 | SGSWSNIGNDNVY |
| 353 | RNNQRPS |
| 354 | QSYDRSLSGSV |
| 355 | GAGGTGCAACTGTTGGAGTCTGGGGGAGGCTTGGTACAGCCTGGGGGGTCCCTGA |
| | GACTCTCCTGTGCAGCCTCTGGATTCACCTTTGTTACATATTGGATGACCTGGGTCC |
| | GCCAGGCTCCAGGGAAGGGGCTGGAGTGGGTATCGGGTGTTAGTTGGAATGGCAG |
| | TAGGACGCACTATGTGGACTCCGTGAAGCGCCGATTCACCATCTCCAGAGACAATT |
| | CCAAGAACACGCTGTATCTGCAAATGAACAGCCTGAGAGCCGAGGACACTGCCGT |
| | GTATTACTGTGCGAGATATAGTGGCTACCCTGACTACTACGGTATGGACGTCTGGG |
| | GCCAAGGTACCCTGGTCACCGTGAGTTCA |
| 356 | ACATATTGGATGACC |
| 357 | GGTGTTAGTTGGAATGGCAGTAGGACGCACTATGTGGACTCCGTGAAGCGC |
| 358 | TATAGTGGCTACCCTGACTACTACGGTATGGACGTC |
| 359 | CAGTCTGTGCTGACTCAGCCACCCTCAGCGTCTGGGACCCCCGGGCAGAGGGTCAC |
| | CATCTCTTGTTCTGGAAGCTGGTCCAACATCGGAAATGATAATGTATACTGGTATC |
| | AGCAGCTCCCAGGAACGGCCCCCAAACTCCTCATCTATAGGAATAATCAGCGGCC |
| | CTCAGGGGTCCCTGACCGATTCTCTGGCTCCAAGTCTGGCACCTCAGCCTCCCTGG |
| | CCATCAGTGGGCTCCGGTCCGAGGATGAGGCTGATTATTACTGCCAGTCTTATGAC |
| | AGGAGCCTGAGTGGTTCGGTGTTCGGCGGAGGAACCAAGCTGACGGTCCTA |
| 360 | TCTGGAAGCTGGTCCAACATCGGAAATGATAATGTATAC |
| 361 | AGGAATAATCAGCGGCCCTCA |
| 362 | CAGTCTTATGACAGGAGCCTGAGTGGTTCGGTG |
| 363 | EVQLLESGGGLVQPGGSLRLSCAASGFTFVTYWMTWVRQAPGKGLEWVSGVSWNGS |
| | RTHYVDSVKRRFTISRDNSKNTLYLQMNSLRAEDTAVYYCARYSGYPDYYGMDVWG |
| | QGTLVTVSSASTKGPSVFPLAPSSKSTSGGTAALGCLVKDYFPEPVTVSWNSGALTSGV |
| | HTFPAVLQSSGLYSLSSVVTVPSSSLGTQTYICNVNHKPSNTKVDKKVEPKSCDKTHTC |
| | PPCPAPELLGGPSVFLFPPKPKDTLMISRTPEVTCVVVDVSHEDPEVKFNWYVDGVEV |
| | HNAKTKPREEQYNSTYRVVSVLTVLHQDWLNGKEYKCKVSNKALPAPIEKTISKAKG |
| | QPREPQVYTLPPSRDELTKNQVSLTCLVKGFYPSDIAVEWESNGQPENNYKTTPPVLDS |
| | DGSFFLYSKLTVDKSRWQQGNVFSCSVMHEALHNHYTQKSLSLSPG |
| 364 | QSVLTQPPSASGTPGQRVTISCSGSWSNIGNDNVYWYQQLPGTAPKLLIYRNNQRPSG |
| | VPDRFSGSKSGTSASLAISGLRSEDEADYYCQSYDRSLSGSVFGGGTKLTVLGQPKAAP |
| | SVTLFPPSSEELQANKATLVCLISDFYPGAVTVAWKADSSPVKAGVETTTPSKQSNNK |
| | YAASSYLSLTPEQWKSHRSYSCQVTHEGSTVEKTVAPTECS |
| 365 | EVQLLESGGGLVQPGGSLRLSCAASGFTFSSYGMHWVRQAPGKGLEWVSGVSWNGS |
| | RTRYADSVKGRFTISRDNSKNTLYLQMNSLRAEDTAVYYCTRGSYNSGWYAVSWGQ |
| | GTLVTVSS |
| 366 | SYGMH |
| 367 | GVSWNGSRTRYADSVKG |
| 368 | GSYNSGWYAVS |
| 369 | QSVLTQPPSASGTPGQRVTISCSGSSSNIGSYPVNWYQQLPGTAPKLLIYRNNQRPSGVP |
| | DRFSGSKSGTSASLAISGLRSEDEADYYCSSYSVTDNLIFGGGTKLTVL |
| 370 | SGSSSNIGSYPVN |
| 371 | RNNQRPS |
| 372 | SSYSVTDNLI |
| 373 | GAGGTGCAGCTGTTGGAGTCTGGGGGAGGCTTGGTACAGCCTGGGGGGTCCCTGA |
| | GACTCTCCTGTGCAGCCTCTGGATTCACCTTCAGTAGCTATGGCATGCACTGGGTC |
| | CGCCAGGCTCCAGGCAAGGGGCTGGAGTGGGTATCGGGTGTTAGTTGGAATGGCA |
| | GTAGGACGCGCTATGCGGACTCTGTGAAGGGCCGATTCACCATCTCCAGAGACAA |
| | TTCCAAGAACACGCTGTATCTGCAAATGAACAGCCTGAGAGCCGAGGACACTGCC |
| | GTGTATTACTGTACTAGAGGGTCATATAATAGTGGCTGGTACGCGGTCTCCTGGGG |
| | CCAAGGTACCCTGGTCACCGTGAGTTCA |
| 374 | AGCTATGGCATGCAC |
| 375 | GGTGTTAGTTGGAATGGCAGTAGGACGCGCTATGCGGACTCTGTGAAGGGC |
| 376 | GGGTCATATAATAGTGGCTGGTACGCGGTCTCC |
| 377 | CAGTCTGTGCTGACTCAGCCACCCTCAGCGTCTGGGACCCCTGGGCAGAGGGTCAC |
| | CATCTCTTGTTCTGGAAGCAGTTCCAACATCGGGAGTTATCCTGTAAACTGGTATC |
| | AGCAGCTCCCAGGAACGGCCCCCAAACTCCTCATCTATAGGAATAATCAGCGGCC |
| | CTCAGGGGTCCCTGACCGATTCTCTGGCTCCAAGTCTGGCACCTCAGCCTCCCTGG |
| | CCATCAGTGGGCTCCGGTCCGAGGATGAGGCTGATTATTACTGCAGCTCATATTCT |
| | GTCACCGACAATTTGATATTCGGCGGAGGAACCAAGCTGACGGTCCTA |
| 378 | TCTGGAAGCAGTTCCAACATCGGGAGTTATCCTGTAAAC |
| 379 | AGGAATAATCAGCGGCCCTCA |
| 380 | AGCTCATATTCTGTCACCGACAATTTGATA |
| 381 | EVQLLESGGGLVQPGGSLRLSCAASGFTFSSYGMHWVRQAPGKGLEWVSGVSWNGS |
| | RTRYADSVKGRFTISRDNSKNTLYLQMNSLRAEDTAVYYCTRGSYNSGWYAVSWGQ |
| | GTLVTVSSASTKGPSVFPLAPSSKSTSGGTAALGCLVKDYFPEPVTVSWNSGALTSGVH |
| | TFPAVLQSSGLYSLSSVVTVPSSSLGTQTYICNVNHKPSNTKVDKKVEPKSCDKTHTCP |
| | PCPAPELLGGPSVFLFPPKPKDTLMISRTPEVTCVVVDVSHEDPEVKFNWYVDGVEVH |
| | NAKTKPREEQYNSTYRVVSVLTVLHQDWLNGKEYKCKVSNKALPAPIEKTISKAKGQ |
| | PREPQVYTLPPSRDELTKNQVSLTCLVKGFYPSDIAVEWESNGQPENNYKTTPPVLDSD |
| | GSFFLYSKLTVDKSRWQQGNVFSCSVMHEALHNHYTQKSLSLSPG |
| 382 | QSVLTQPPSASGTPGQRVTISCSGSSSNIGSYPVNWYQQLPGTAPKLLIYRNNQRPSGVP |
| | DRFSGSKSGTSASLAISGLRSEDEADYYCSSYSVTDNLIFGGGTKLTVLGQPKAAPSVT |
| | LFPPSSEELQANKATLVCLISDFYPGAVTVAWKADSSPVKAGVETTTPSKQSNNKYAA |
| | SSYLSLTPEQWKSHRSYSCQVTHEGSTVEKTVAPTECS |
| 383 | EVQLLESGGGLVQPGGSLRLSCAASGFTFSNYRMTWVRQAPGKGLEWVSGINWNGGS |
| | TGYADSVKGRFTISRDNSKNTLYLQMNSLRAEDTAVYYCARGRFDTRGFYGFDYWG |
| | QGTLVTVSS |
| 384 | NYRMT |
| 385 | GINWNGGSTGYADSVKG |
| 386 | GRFDTRGFYGFDY |
| 387 | QSVLTQPPSASGTPGQRVTISCTGSSSNIGAGYDVHWYQQLPGTAPKLLIYSHNQRPSG |
| | VPDRFSGSKSGTSASLAISGLRSEDEADYYCSAWDSSLSAWVFGGGTKLTVL |
| 388 | TGSSSNIGAGYDVH |
| 389 | SHNQRPS |
| 390 | SAWDSSLSAWV |
| 391 | GAGGTGCAGCTGTTGGAGTCTGGGGGAGGCTTGGTACAGCCTGGGGGGTCCCTGA |
| | GACTCTCCTGTGCAGCCTCTGGATTCACCTTCAGTAATTATAGGATGACCTGGGTC |
| | CGCCAGGCTCCAGGGAAGGGGCTGGAGTGGGTCTCTGGTATTAATTGGAATGGTG |
| | GTAGCACAGGTTATGCAGACTCTGTGAAGGGCCGATTCACCATCTCCAGAGACAAT |
| | TCCAAGAACACGCTGTATCTGCAAATGAACAGCCTGAGAGCCGAGGACACTGCCG |
| | TGTATTACTGTGCCAGAGGGCGCTTTGATACTAGGGGTTTTTACGGCTTTGACTACT |
| | GGGGCCAAGGTACCCTGGTCACCGTGAGTTCA |
| 392 | AATTATAGGATGACC |
| 393 | GGTATTAATTGGAATGGTGGTAGCACAGGTTATGCAGACTCTGTGAAGGGC |
| 394 | GGGCGCTTTGATACTAGGGGTTTTTACGGCTTTGACTAC |
| 395 | CAGTCTGTGCTGACTCAGCCACCCTCAGCGTCTGGGACCCCCGGGCAGAGGGTCAC |
| | CATCTCCTGCACTGGGAGCAGCTCCAACATCGGGGCAGGTTATGATGTACACTGGT |
| | ATCAGCAGCTCCCAGGAACGGCCCCCAAACTCCTCATCTATAGTCATAATCAGCGG |
| | CCCTCAGGGGTCCCTGACCGATTCTCTGGCTCCAAGTCTGGCACCTCAGCCTCCCT |
| | GGCCATCAGTGGGCTCCGGTCCGAGGATGAGGCTGATTATTACTGCTCAGCATGGG |
| | ACAGCAGCCTCAGTGCTTGGGTGTTCGGCGGAGGAACCAAGCTGACGGTCCTA |
| 396 | ACTGGGAGCAGCTCCAACATCGGGGCAGGTTATGATGTACAC |
| 397 | AGTCATAATCAGCGGCCCTCA |
| 398 | TCAGCATGGGACAGCAGCCTCAGTGCTTGGGTG |
| 399 | EVQLLESGGGLVQPGGSLRLSCAASGFTFSNYRMTWVRQAPGKGLEWVSGINWNGGS |
| | TGYADSVKGRFTISRDNSKNTLYLQMNSLRAEDTAVYYCARGRFDTRGFYGFDYWG |
| | QGTLVTVSSASTKGPSVFPLAPSSKSTSGGTAALGCLVKDYFPEPVTVSWNSGALTSGV |
| | HTFPAVLQSSGLYSLSSVVTVPSSSLGTQTYICNVNHKPSNTKVDKKVEPKSCDKTHTC |
| | PPCPAPELLGGPSVFLFPPKPKDTLMISRTPEVTCVVVDVSHEDPEVKFNWYVDGVEV |
| | HNAKTKPREEQYNSTYRVVSVLTVLHQDWLNGKEYKCKVSNKALPAPIEKTISKAKG |
| | QPREPQVYTLPPSRDELTKNQVSLTCLVKGFYPSDIAVEWESNGQPENNYKTTPPVLDS |
| | DGSFFLYSKLTVDKSRWQQGNVFSCSVMHEALHNHYTQKSLSLSPG |
| 400 | QSVLTQPPSASGTPGQRVTISCTGSSSNIGAGYDVHWYQQLPGTAPKLLIYSHNQRPSG |
| | VPDRFSGSKSGTSASLAISGLRSEDEADYYCSAWDSSLSAWVFGGGTKLTVLGQPKAA |
| | PSVTLFPPSSEELQANKATLVCLISDFYPGAVTVAWKADSSPVKAGVETTTPSKQSNNK |
| | YAASSYLSLTPEQWKSHRSYSCQVTHEGSTVEKTVAPTECS |
| 401 | EVQLLESGGGLVQPGGSLRLSCAASGFTFSSYAMSWVRQAPGKGLEWVSGIRWNSGS |
| | KGYAGSVKGRFTISRDNSKNTLYLQMNSLRAEDTAVYYCVRSGNYYVGYHGMDVW |
| | GQGTLVTVSS |
| 402 | SYAMS |
| 403 | GIRWNSGSKGYAGSVKG |
| 404 | SGNYYVGYHGMDV |
| 405 | QSVLTQPPSASGTPGQRVTISCSGGNSNIGTYFVSWYQQLPGTAPKLLIYTNNQRPSGV |
| | PDRFSGSKSGTSASLAISGLRSEDEADYYCETWDSNTRVFGGGTKLTVL |
| 406 | SGGNSNIGTYFVS |
| 407 | TNNQRPS |
| 408 | ETWDSNTRV |
| 409 | GAAGTTCAGCTGCTGGAATCTGGCGGCGGACTGGTTCAACCTGGCGGATCTCTGAG |
| | ACTGAGCTGTGCCGCCAGCGGCTTCACCTTTAGCAGCTACGCCATGAGCTGGGTCC |
| | GACAGGCTCCTGGCAAAGGCCTTGAATGGGTGTCCGGCATCAGATGGAACAGCGG |
| | CTCTAAGGGCTATGCCGGCTCTGTGAAGGGCAGATTCACCATCAGCCGGGACAAC |
| | AGCAAGAACACCCTGTACCTGCAGATGAACAGCCTGAGAGCCGAGGACACCGCCG |
| | TGTACTACTGTGTGCGGAGCGGCAATTACTACGTGGGCTACCACGGCATGGATGTG |
| | TGGGGACAGGGAACCCTGGTTACCGTTTCTTCA |
| 410 | AGCTACGCCATGAGC |
| 411 | GGCATCAGATGGAACAGCGGCTCTAAGGGCTATGCCGGCTCTGTGAAGGGC |
| 412 | AGCGGCAATTACTACGTGGGCTACCACGGCATGGATGTG |
| 413 | CAGTCTGTTCTGACACAGCCTCCTAGCGCCTCTGGCACACCTGGACAGAGAGTGAC |
| | CATCAGCTGTAGCGGCGGCAACAGCAACATCGGCACCTACTTCGTGTCCTGGTATC |
| | AGCAGCTGCCTGGCACAGCCCCTAAACTGCTGATCTACACCAACAACCAGCGGCCT |
| | AGCGGCGTGCCCGATAGATTTTCTGGCAGCAAGAGCGGCACAAGCGCCAGCCTGG |
| | CTATCTCTGGACTGAGATCTGAGGACGAGGCCGACTACTACTGCGAGACATGGGA |
| | CAGCAACACCAGAGTGTTTGGCGGAGGCACCAAGCTGACAGTGCTA |
| 414 | AGCGGCGGCAACAGCAACATCGGCACCTACTTCGTGTCC |
| 415 | ACCAACAACCAGCGGCCTAGC |
| 416 | GAGACATGGGACAGCAACACCAGAGTG |
| 417 | EVQLLESGGGLVQPGGSLRLSCAASGFTFSSYAMSWVRQAPGKGLEWVSGIRWNSGS |
| | KGYAGSVKGRFTISRDNSKNTLYLQMNSLRAEDTAVYYCVRSGNYYVGYHGMDVW |
| | GQGTLVTVSSASTKGPSVFPLAPSSKSTSGGTAALGCLVKDYFPEPVTVSWNSGALTSG |
| | VHTFPAVLQSSGLYSLSSVVTVPSSSLGTQTYICNVNHKPSNTKVDKKVEPKSCDKTHT |
| | CPPCPAPELLGGPSVFLFPPKPKDTLMISRTPEVTCVVVDVSHEDPEVKFNWYVDGVE |
| | VHNAKTKPREEQYNSTYRVVSVLTVLHQDWLNGKEYKCKVSNKALPAPIEKTISKAK |
| | GQPREPQVYTLPPSRDELTKNQVSLTCLVKGFYPSDIAVEWESNGQPENNYKTTPPVL |
| | DSDGSFFLYSKLTVDKSRWQQGNVFSCSVMHEALHNHYTQKSLSLSPG |
| 418 | QSVLTQPPSASGTPGQRVTISCSGGNSNIGTYFVSWYQQLPGTAPKLLIYTNNQRPSGV |
| | PDRFSGSKSGTSASLAISGLRSEDEADYYCETWDSNTRVFGGGTKLTVLGQPKAAPSV |
| | TLFPPSSEELQANKATLVCLISDFYPGAVTVAWKADSSPVKAGVETTTPSKQSNNKYA |
| | ASSYLSLTPEQWKSHRSYSCQVTHEGSTVEKTVAPTECS |
| 419 | EVQLLESGGGLVQPGGSLRLSCAASGFTFSHYGMHWVRQAPGKGLEWVSGINWNGG |
| | STGYADSVKGRFTISRDNSKNTLYLQMNSLRAEDTAVYYCARGHHSGYDGRFFDYW |
| | GQGTLVTVSS |
| 420 | HYGMH |
| 421 | GINWNGGSTGYADSVKG |
| 422 | GHHSGYDGRFFDY |
| 423 | QSVLTQPPSASGTPGQRVTISCTGSSSNIGAGYNVHWYQQLPGTAPKLLIYTNNRRPSG |
| | VPDRFSGSKSGTSASLAISGLRSEDEADYYCAAWDASLSGWVFGGGTKLTVL |
| 424 | TGSSSNIGAGYNVH |
| 425 | TNNRRPS |
| 426 | AAWDASLSGWV |
| 427 | GAAGTTCAGCTGCTGGAATCTGGCGGCGGACTGGTTCAACCTGGCGGATCTCTGAG |
| | ACTGAGCTGTGCCGCCAGCGGCTTCACCTTTAGCCACTATGGCATGCACTGGGTCC |
| | GACAGGCCCCTGGCAAAGGACTTGAATGGGTGTCCGGCATCAACTGGAATGGCGG |
| | CTCTACAGGCTACGCCGACTCTGTGAAGGGCAGATTCACCATCAGCCGGGACAAC |
| | AGCAAGAACACCCTGTACCTGCAGATGAACTCCCTGAGAGCCGAGGACACCGCCG |
| | TGTACTATTGTGCCAGAGGCCACCACAGCGGCTACGACGGCAGATTCTTTGACTAT |
| | TGGGGCCAGGGCACCCTGGTCACAGTTTCTTCA |
| 428 | CACTATGGCATGCAC |
| 429 | GGCATCAACTGGAATGGCGGCTCTACAGGCTACGCCGACTCTGTGAAGGGC |
| 430 | GGCCACCACAGCGGCTACGACGGCAGATTCTTTGACTAT |
| 431 | CAGTCTGTTCTGACACAGCCTCCTAGCGCCTCTGGCACACCTGGACAGAGAGTGAC |
| | CATCAGCTGTACCGGCAGCAGCTCCAATATCGGAGCCGGCTACAACGTGCACTGGT |
| | ATCAGCAGCTGCCTGGCACAGCCCCTAAACTGCTGATCTACACCAACAACAGACG |
| | GCCCAGCGGCGTGCCCGATAGATTTTCTGGCAGCAAGAGCGGCACAAGCGCCAGC |
| | CTGGCTATCTCTGGACTGAGATCTGAGGACGAGGCCGACTACTATTGCGCCGCCTG |
| | GGATGCTTCTCTGAGCGGATGGGTTTTCGGCGGAGGCACCAAACTGACAGTGCTA |
| 432 | ACCGGCAGCAGCTCCAATATCGGAGCCGGCTACAACGTGCAC |
| 433 | ACCAACAACAGACGGCCCAGC |
| 434 | GCCGCCTGGGATGCTTCTCTGAGCGGATGGGTT |
| 435 | EVQLLESGGGLVQPGGSLRLSCAASGFTFSHYGMHWVRQAPGKGLEWVSGINWNGG |
| | STGYADSVKGRFTISRDNSKNTLYLQMNSLRAEDTAVYYCARGHHSGYDGRFFDYW |
| | GQGTLVTVSSASTKGPSVFPLAPSSKSTSGGTAALGCLVKDYFPEPVTVSWNSGALTSG |
| | VHTFPAVLQSSGLYSLSSVVTVPSSSLGTQTYICNVNHKPSNTKVDKKVEPKSCDKTHT |
| | CPPCPAPELLGGPSVFLFPPKPKDTLMISRTPEVTCVVVDVSHEDPEVKFNWYVDGVE |
| | VHNAKTKPREEQYNSTYRVVSVLTVLHQDWLNGKEYKCKVSNKALPAPIEKTISKAK |
| | GQPREPQVYTLPPSRDELTKNQVSLTCLVKGFYPSDIAVEWESNGQPENNYKTTPPVL |
| | DSDGSFFLYSKLTVDKSRWQQGNVFSCSVMHEALHNHYTQKSLSLSPG |
| 436 | QSVLTQPPSASGTPGQRVTISCTGSSSNIGAGYNVHWYQQLPGTAPKLLIYTNNRRPSG |
| | VPDRFSGSKSGTSASLAISGLRSEDEADYYCAAWDASLSGWVFGGGTKLTVLGQPKA |
| | APSVTLFPPSSEELQANKATLVCLISDFYPGAVTVAWKADSSPVKAGVETTTPSKQSNN |
| | KYAASSYLSLTPEQWKSHRSYSCQVTHEGSTVEKTVAPTECS |
| 437 | EVQLLESGGGLVQPGGSLRLSCAASGFTFSNAWMSWVRQAPGKGLEWVSGINWNGG |
| | STGYADSVKGRFTISRDNSKNTLYLQMNSLRAEDTAVYYCARTYTGNYGPYFDYWG |
| | QGTLVTVSS |
| 438 | NAWMS |
| 439 | GINWNGGSTGYADSVKG |
| 440 | TYTGNYGPYFDY |
| 441 | QSVLTQPPSASGTPGQRVTISCTGSSSNIGAGYDVHWYQQLPGTAPKLLIYKNNQRPSG |
| | VPDRFSGSKSGTSASLAISGLRSEDEADYYCAAWDDSLRGWVFGGGTKLTVL |
| 442 | TGSSSNIGAGYDVH |
| 443 | KNNQRPS |
| 444 | AAWDDSLRGWV |
| 445 | GAAGTTCAGCTGCTGGAATCTGGCGGCGGACTGGTTCAACCTGGCGGATCTCTGAG |
| | ACTGAGCTGTGCCGCCAGCGGCTTCACCTTTAGCAATGCCTGGATGAGCTGGGTCC |
| | GACAGGCCCCTGGAAAAGGCCTTGAATGGGTGTCCGGCATCAACTGGAATGGCGG |
| | CTCTACAGGCTACGCCGACTCTGTGAAGGGCAGATTCACCATCAGCCGGGACAAC |
| | AGCAAGAACACCCTGTACCTGCAGATGAACTCCCTGAGAGCCGAGGACACCGCCG |
| | TGTACTACTGTGCCAGAACCTACACCGGCAACTACGGCCCCTACTTCGATTATTGG |
| | GGCCAGGGCACACTGGTCACCGTTTCTTCA |
| 446 | AATGCCTGGATGAGC |
| 447 | GGCATCAACTGGAATGGCGGCTCTACAGGCTACGCCGACTCTGTGAAGGGC |
| 448 | ACCTACACCGGCAACTACGGCCCCTACTTCGATTAT |
| 449 | CAGTCTGTTCTGACACAGCCTCCTAGCGCCTCTGGCACACCTGGACAGAGAGTGAC |
| | CATCAGCTGTACCGGCAGCAGCTCCAATATCGGAGCCGGCTATGACGTGCACTGGT |
| | ATCAGCAGCTGCCTGGCACAGCCCCTAAACTGCTGATCTACAAGAACAACCAGCG |
| | GCCTAGCGGCGTGCCCGATAGATTTTCTGGCAGCAAGAGCGGCACAAGCGCCAGC |
| | CTGGCTATCTCTGGACTGAGATCTGAGGACGAGGCCGACTACTATTGCGCCGCCTG |
| | GGATGATTCTCTGAGAGGCTGGGTTTTCGGCGGAGGCACCAAACTGACAGTGCTA |
| 450 | ACCGGCAGCAGCTCCAATATCGGAGCCGGCTATGACGTGCAC |
| 451 | AAGAACAACCAGCGGCCTAGC |
| 452 | GCCGCCTGGGATGATTCTCTGAGAGGCTGGGTT |
| 453 | EVQLLESGGGLVQPGGSLRLSCAASGFTFSNAWMSWVRQAPGKGLEWVSGINWNGG |
| | STGYADSVKGRFTISRDNSKNTLYLQMNSLRAEDTAVYYCARTYTGNYGPYFDYWG |
| | QGTLVTVSSASTKGPSVFPLAPSSKSTSGGTAALGCLVKDYFPEPVTVSWNSGALTSGV |
| | HTFPAVLQSSGLYSLSSVVTVPSSSLGTQTYICNVNHKPSNTKVDKKVEPKSCDKTHTC |
| | PPCPAPELLGGPSVFLFPPKPKDTLMISRTPEVTCVVVDVSHEDPEVKFNWYVDGVEV |
| | HNAKTKPREEQYNSTYRVVSVLTVLHQDWLNGKEYKCKVSNKALPAPIEKTISKAKG |
| | QPREPQVYTLPPSRDELTKNQVSLTCLVKGFYPSDIAVEWESNGQPENNYKTTPPVLDS |
| | DGSFFLYSKLTVDKSRWQQGNVFSCSVMHEALHNHYTQKSLSLSPG |
| 454 | QSVLTQPPSASGTPGQRVTISCTGSSSNIGAGYDVHWYQQLPGTAPKLLIYKNNQRPSG |
| | VPDRFSGSKSGTSASLAISGLRSEDEADYYCAAWDDSLRGWVFGGGTKLTVLGQPKA |
| | APSVTLFPPSSEELQANKATLVCLISDFYPGAVTVAWKADSSPVKAGVETTTPSKQSNN |
| | KYAASSYLSLTPEQWKSHRSYSCQVTHEGSTVEKTVAPTECS |
| 455 | EVQLLESGGGLVQPGGSLRLSCAASGFTFSSAWMSWVRQAPGKGLEWVSGISWSGGS |
| | TGYADSVKGRFTISRDNSKNTLYLQMNSLRAEDTAVYYCARTYSGHYGPYFDYWGQ |
| | GTLVTVSS |
| 456 | SAWMS |
| 457 | GISWSGGSTGYADSVKG |
| 458 | TYSGHYGPYFDY |
| 459 | QSVLTQPPSASGTPGQRVTISCSGSSSNIGSHTVNWYQQLPGTAPKLLIYRNNQRPSGVP |
| | DRFSGSKSGTSASLAISGLRSEDEADYYCAAWDDSLNGWVFGGGTKLTVL |
| 460 | SGSSSNIGSHTVN |
| 461 | RNNQRPS |
| 462 | AAWDDSLNGWV |
| 463 | GAAGTTCAGCTGCTGGAATCTGGCGGCGGACTGGTTCAACCTGGCGGATCTCTGAG |
| | ACTGAGCTGTGCCGCCAGCGGCTTCACATTTTCTAGCGCCTGGATGAGCTGGGTCC |
| | GACAGGCTCCTGGAAAAGGCCTGGAATGGGTGTCCGGCATCTCTTGGAGCGGCGG |
| | CTCTACAGGCTATGCCGATTCTGTGAAGGGCAGATTCACCATCAGCCGGGACAACA |
| | GCAAGAACACCCTGTACCTGCAGATGAACTCCCTGAGAGCCGAGGACACCGCCGT |
| | GTACTACTGTGCCAGAACATACAGCGGCCACTACGGCCCCTACTTCGATTATTGGG |
| | GCCAGGGCACACTGGTCACCGTTTCTTCA |
| 464 | AGCGCCTGGATGAGC |
| 465 | GGCATCTCTTGGAGCGGCGGCTCTACAGGCTATGCCGATTCTGTGAAGGGC |
| 466 | ACATACAGCGGCCACTACGGCCCCTACTTCGATTAT |
| 467 | CAGTCTGTGCTGACTCAGCCACCCTCAGCGTCTGGGACCCCCGGGCAGAGGGTCAC |
| | CATCTCTTGTTCTGGAAGCAGCTCCAACATCGGAAGTCATACTGTAAACTGGTATC |
| | AGCAGCTCCCAGGAACGGCCCCCAAACTCCTCATCTATAGGAATAATCAGCGGCC |
| | CTCAGGGGTCCCTGACCGATTCTCTGGCTCCAAGTCTGGCACCTCAGCCTCCCTGG |
| | CCATCAGTGGGCTCCGGTCCGAGGATGAGGCTGATTATTACTGTGCAGCATGGGAT |
| | GACAGCCTGAATGGTTGGGTGTTCGGCGGAGGAACCAAGCTGACGGTCCTA |
| 468 | TCTGGAAGCAGCTCCAACATCGGAAGTCATACTGTAAAC |
| 469 | AGGAATAATCAGCGGCCCTCA |
| 470 | GCAGCATGGGATGACAGCCTGAATGGTTGGGTG |
| 471 | EVQLLESGGGLVQPGGSLRLSCAASGFTFSSAWMSWVRQAPGKGLEWVSGISWSGGS |
| | TGYADSVKGRFTISRDNSKNTLYLQMNSLRAEDTAVYYCARTYSGHYGPYFDYWGQ |
| | GTLVTVSSASTKGPSVFPLAPSSKSTSGGTAALGCLVKDYFPEPVTVSWNSGALTSGVH |
| | TFPAVLQSSGLYSLSSVVTVPSSSLGTQTYICNVNHKPSNTKVDKKVEPKSCDKTHTCP |
| | PCPAPELLGGPSVFLFPPKPKDTLMISRTPEVTCVVVDVSHEDPEVKFNWYVDGVEVH |
| | NAKTKPREEQYNSTYRVVSVLTVLHQDWLNGKEYKCKVSNKALPAPIEKTISKAKGQ |
| | PREPQVYTLPPSRDELTKNQVSLTCLVKGFYPSDIAVEWESNGQPENNYKTTPPVLDSD |
| | GSFFLYSKLTVDKSRWQQGNVFSCSVMHEALHNHYTQKSLSLSPG |
| 472 | QSVLTQPPSASGTPGQRVTISCSGSSSNIGSHTVNWYQQLPGTAPKLLIYRNNQRPSGVP |
| | DRFSGSKSGTSASLAISGLRSEDEADYYCAAWDDSLNGWVFGGGTKLTVLGQPKAAP |
| | SVTLFPPSSEELQANKATLVCLISDFYPGAVTVAWKADSSPVKAGVETTTPSKQSNNK |
| | YAASSYLSLTPEQWKSHRSYSCQVTHEGSTVEKTVAPTECS |
| 473 | EVQLLESGGGLVQPGGSLRLSCAASGFTFSSYGMHWVRQAPGKGLEWVSAIKWGGGS |
| | HGYADSVKGRFTISRDNSKNTLYLQMNSLRAEDTAVYYCARGHHSGKDGRFFDYWG |
| | QGTLVTVSS |
| 474 | SYGMH |
| 475 | AIKWGGGSHGYADSVKG |
| 476 | GHHSGKDGRFFDY |
| 477 | QSVLTQPPSVSGAPGQRVTISCTGSSSNIGAGYNVHWYQQLPGTAPKLLIYTNNRRPSG |
| | VPDRFSGSKSGTSASLAISGLRSEDEADYYCAAWDASLSGWVFGGGTKLTVL |
| 478 | TGSSSNIGAGYNVH |
| 479 | TNNRRPS |
| 480 | AAWDASLSGWV |
| 481 | GAAGTTCAGCTGCTGGAATCTGGCGGCGGACTGGTTCAACCTGGCGGATCTCTGAG |
| | ACTGAGCTGTGCCGCCAGCGGCTTCACCTTTAGCAGCTATGGCATGCACTGGGTCC |
| | GACAGGCCCCTGGCAAAGGACTTGAATGGGTGTCCGCCATTAAGTGGGGCGGAGG |
| | CTCTCACGGCTATGCCGATTCTGTGAAGGGCAGATTCACCATCAGCCGGGACAACA |
| | GCAAGAACACCCTGTACCTGCAGATGAACAGCCTGAGAGCCGAGGACACCGCCGT |
| | GTACTATTGTGCCAGAGGCCACCACTCTGGCAAGGACGGCAGATTCTTCGACTATT |
| | GGGGCCAGGGCACCCTGGTCACAGTTTCTTCA |
| 482 | AGCTATGGCATGCAC |
| 483 | GCCATTAAGTGGGGCGGAGGCTCTCACGGCTATGCCGATTCTGTGAAGGGC |
| 484 | GGCCACCACTCTGGCAAGGACGGCAGATTCTTCGACTAT |
| 485 | CAGTCTGTTCTGACACAGCCTCCATCTGTGTCTGGCGCCCCTGGACAGAGAGTGAC |
| | CATCAGCTGTACAGGCAGCAGCTCCAATATCGGAGCCGGCTACAACGTGCACTGG |
| | TATCAGCAGCTGCCTGGCACAGCCCCTAAACTGCTGATCTACACCAACAACAGACG |
| | GCCCAGCGGCGTGCCCGATAGATTTTCTGGCAGCAAGAGCGGCACAAGCGCCAGC |
| | CTGGCTATCTCTGGACTGAGATCTGAGGACGAGGCCGACTACTATTGCGCCGCCTG |
| | GGATGCTTCTCTGAGCGGATGGGTTTTCGGCGGAGGCACCAAACTGACAGTGCTA |
| 486 | ACAGGCAGCAGCTCCAATATCGGAGCCGGCTACAACGTGCAC |
| 487 | ACCAACAACAGACGGCCCAGC |
| 488 | GCCGCCTGGGATGCTTCTCTGAGCGGATGGGTT |
| 489 | EVQLLESGGGLVQPGGSLRLSCAASGFTFSSYGMHWVRQAPGKGLEWVSAIKWGGGS |
| | HGYADSVKGRFTISRDNSKNTLYLQMNSLRAEDTAVYYCARGHHSGKDGRFFDYWG |
| | QGTLVTVSSASTKGPSVFPLAPSSKSTSGGTAALGCLVKDYFPEPVTVSWNSGALTSGV |
| | HTFPAVLQSSGLYSLSSVVTVPSSSLGTQTYICNVNHKPSNTKVDKKVEPKSCDKTHTC |
| | PPCPAPELLGGPSVFLFPPKPKDTLMISRTPEVTCVVVDVSHEDPEVKFNWYVDGVEV |
| | HNAKTKPREEQYNSTYRVVSVLTVLHQDWLNGKEYKCKVSNKALPAPIEKTISKAKG |
| | QPREPQVYTLPPSRDELTKNQVSLTCLVKGFYPSDIAVEWESNGQPENNYKTTPPVLDS |
| | DGSFFLYSKLTVDKSRWQQGNVFSCSVMHEALHNHYTQKSLSLSPGK |
| 490 | QSVLTQPPSVSGAPGQRVTISCTGSSSNIGAGYNVHWYQQLPGTAPKLLIYTNNRRPSG |
| | VPDRFSGSKSGTSASLAISGLRSEDEADYYCAAWDASLSGWVFGGGTKLTVLGQPKA |
| | APSVTLFPPSSEELQANKATLVCLISDFYPGAVTVAWKADSSPVKAGVETTTPSKQSNN |
| | KYAASSYLSLTPEQWKSHRSYSCQVTHEGSTVEKTVAPTECS |
| 491 | EVQLLESGGGLVQPGGSLRLSCAASGFTFSSYGMHWVRQAPGKGLEWVSAIKWGGGS |
| | HGYADSVKGRFTISRDNSKNTLYLQMNSLRAEDTAVYYCARGHHKGYDGRFFDYWG |
| | QGTLVTVSS |
| 492 | SYGMH |
| 493 | AIKWGGGSHGYADSVKG |
| 494 | GHHKGYDGRFFDY |
| 495 | QSVLTQPPSVSGAPGQRVTISCTGSSSNIGAGYNVHWYQQLPGTAPKLLIYTNNRRPSG |
| | VPDRFSGSKSGTSASLAISGLRSEDEADYYCAAWDASLSGWVFGGGTKLTVL |
| 496 | TGSSSNIGAGYNVH |
| 497 | TNNRRPS |
| 498 | AAWDASLSGWV |
| 499 | GAAGTTCAGCTGCTGGAATCTGGCGGCGGACTGGTTCAACCTGGCGGATCTCTGAG |
| | ACTGAGCTGTGCCGCCAGCGGCTTCACCTTTAGCAGCTATGGCATGCACTGGGTCC |
| | GACAGGCCCCTGGCAAAGGACTTGAATGGGTGTCCGCCATTAAGTGGGGCGGAGG |
| | CTCTCACGGCTATGCCGATTCTGTGAAGGGCAGATTCACCATCAGCCGGGACAACA |
| | GCAAGAACACCCTGTACCTGCAGATGAACAGCCTGAGAGCCGAGGACACCGCCGT |
| | GTACTATTGTGCCAGAGGCCACCACAAGGGCTACGACGGCAGATTCTTCGACTATT |
| | GGGGCCAGGGCACCCTGGTCACAGTTTCTTCA |
| 500 | AGCTATGGCATGCAC |
| 501 | GCCATTAAGTGGGGCGGAGGCTCTCACGGCTATGCCGATTCTGTGAAGGGC |
| 502 | GGCCACCACAAGGGCTACGACGGCAGATTCTTCGACTAT |
| 503 | CAGTCTGTTCTGACACAGCCTCCATCTGTGTCTGGCGCCCCTGGACAGAGAGTGAC |
| | CATCAGCTGTACAGGCAGCAGCTCCAATATCGGAGCCGGCTACAACGTGCACTGG |
| | TATCAGCAGCTGCCTGGCACAGCCCCTAAACTGCTGATCTACACCAACAACAGACG |
| | GCCCAGCGGCGTGCCCGATAGATTTTCTGGCAGCAAGAGCGGCACAAGCGCCAGC |
| | CTGGCTATCTCTGGACTGAGATCTGAGGACGAGGCCGACTACTATTGCGCCGCCTG |
| | GGATGCTTCTCTGAGCGGATGGGTTTTCGGCGGAGGCACCAAACTGACAGTGCTA |
| 504 | ACAGGCAGCAGCTCCAATATCGGAGCCGGCTACAACGTGCAC |
| 505 | ACCAACAACAGACGGCCCAGC |
| 506 | GCCGCCTGGGATGCTTCTCTGAGCGGATGGGTT |
| 507 | EVQLLESGGGLVQPGGSLRLSCAASGFTFSSYGMHWVRQAPGKGLEWVSAIKWGGGS |
| | HGYADSVKGRFTISRDNSKNTLYLQMNSLRAEDTAVYYCARGHHKGYDGRFFDYWG |
| | QGTLVTVSSASTKGPSVFPLAPSSKSTSGGTAALGCLVKDYFPEPVTVSWNSGALTSGV |
| | HTFPAVLQSSGLYSLSSVVTVPSSSLGTQTYICNVNHKPSNTKVDKKVEPKSCDKTHTC |
| | PPCPAPELLGGPSVFLFPPKPKDTLMISRTPEVTCVVVDVSHEDPEVKFNWYVDGVEV |
| | HNAKTKPREEQYNSTYRVVSVLTVLHQDWLNGKEYKCKVSNKALPAPIEKTISKAKG |
| | QPREPQVYTLPPSRDELTKNQVSLTCLVKGFYPSDIAVEWESNGQPENNYKTTPPVLDS |
| | DGSFFLYSKLTVDKSRWQQGNVFSCSVMHEALHNHYTQKSLSLSPGK |
| 508 | QSVLTQPPSVSGAPGQRVTISCTGSSSNIGAGYNVHWYQQLPGTAPKLLIYTNNRRPSG |
| | VPDRFSGSKSGTSASLAISGLRSEDEADYYCAAWDASLSGWVFGGGTKLTVLGQPKA |
| | APSVTLFPPSSEELQANKATLVCLISDFYPGAVTVAWKADSSPVKAGVETTTPSKQSNN |
| | KYAASSYLSLTPEQWKSHRSYSCQVTHEGSTVEKTVAPTECS |
| 509 | EVQLLESGGGLVQPGGSLRLSCAASGFTFSSYGMHWVRQAPGKGLEWVSAIKWGGGS |
| | TGYADSVKGRFTISRDNSKNTLYLQMNSLRAEDTAVYYCARGHHSGKDGRFFDYWG |
| | QGTLVTVSS |
| 510 | SYGMH |
| 511 | AIKWGGGSTGYADSVKG |
| 512 | GHHSGKDGRFFDY |
| 513 | QSVLTQPPSVSGAPGQRVTISCTGSSSNIGAGYNVHWYQQLPGTAPKLLIYTNNRRPSG |
| | VPDRFSGSKSGTSASLAISGLRSEDEADYYCAAWDASLSGWVFGGGTKLTVL |
| 514 | TGSSSNIGAGYNVH |
| 515 | TNNRRPS |
| 516 | AAWDASLSGWV |
| 517 | GAAGTTCAGCTGCTGGAATCTGGCGGCGGACTGGTTCAACCTGGCGGATCTCTGAG |
| | ACTGAGCTGTGCCGCCAGCGGCTTCACCTTTAGCAGCTATGGCATGCACTGGGTCC |
| | GACAGGCCCCTGGCAAAGGACTTGAATGGGTGTCCGCCATTAAGTGGGGCGGAGG |
| | CTCTACAGGCTACGCCGATTCTGTGAAGGGCAGATTCACCATCAGCCGGGACAAC |
| | AGCAAGAACACCCTGTACCTGCAGATGAACAGCCTGAGAGCCGAGGACACCGCCG |
| | TGTACTATTGTGCCAGAGGCCACCACTCTGGCAAGGACGGCAGATTCTTCGACTAT |
| | TGGGGCCAGGGCACCCTGGTCACAGTTTCTTCA |
| 518 | AGCTATGGCATGCAC |
| 519 | GCCATTAAGTGGGGCGGAGGCTCTACAGGCTACGCCGATTCTGTGAAGGGC |
| 520 | GGCCACCACTCTGGCAAGGACGGCAGATTCTTCGACTAT |
| 521 | CAGTCTGTTCTGACACAGCCTCCATCTGTGTCTGGCGCCCCTGGACAGAGAGTGAC |
| | CATCAGCTGTACAGGCAGCAGCTCCAATATCGGAGCCGGCTACAACGTGCACTGG |
| | TATCAGCAGCTGCCTGGCACAGCCCCTAAACTGCTGATCTACACCAACAACAGACG |
| | GCCCAGCGGCGTGCCCGATAGATTTTCTGGCAGCAAGAGCGGCACAAGCGCCAGC |
| | CTGGCTATCTCTGGACTGAGATCTGAGGACGAGGCCGACTACTATTGCGCCGCCTG |
| | GGATGCTTCTCTGAGCGGATGGGTTTTCGGCGGAGGCACCAAACTGACAGTGCTA |
| 522 | ACAGGCAGCAGCTCCAATATCGGAGCCGGCTACAACGTGCAC |
| 523 | ACCAACAACAGACGGCCCAGC |
| 524 | GCCGCCTGGGATGCTTCTCTGAGCGGATGGGTT |
| 525 | EVQLLESGGGLVQPGGSLRLSCAASGFTFSSYGMHWVRQAPGKGLEWVSAIKWGGGS |
| | TGYADSVKGRFTISRDNSKNTLYLQMNSLRAEDTAVYYCARGHHSGKDGRFFDYWG |
| | QGTLVTVSSASTKGPSVFPLAPSSKSTSGGTAALGCLVKDYFPEPVTVSWNSGALTSGV |
| | HTFPAVLQSSGLYSLSSVVTVPSSSLGTQTYICNVNHKPSNTKVDKKVEPKSCDKTHTC |
| | PPCPAPELLGGPSVFLFPPKPKDTLMISRTPEVTCVVVDVSHEDPEVKFNWYVDGVEV |
| | HNAKTKPREEQYNSTYRVVSVLTVLHQDWLNGKEYKCKVSNKALPAPIEKTISKAKG |
| | QPREPQVYTLPPSRDELTKNQVSLTCLVKGFYPSDIAVEWESNGQPENNYKTTPPVLDS |
| | DGSFFLYSKLTVDKSRWQQGNVFSCSVMHEALHNHYTQKSLSLSPGK |
| 526 | QSVLTQPPSVSGAPGQRVTISCTGSSSNIGAGYNVHWYQQLPGTAPKLLIYTNNRRPSG |
| | VPDRFSGSKSGTSASLAISGLRSEDEADYYCAAWDASLSGWVFGGGTKLTVLGQPKA |
| | APSVTLFPPSSEELQANKATLVCLISDFYPGAVTVAWKADSSPVKAGVETTTPSKQSNN |
| | KYAASSYLSLTPEQWKSHRSYSCQVTHEGSTVEKTVAPTECS |
| 527 | EVQLLESGGGLVQPGGSLRLSCAASGFTFSSAWMSWVRQAPGKGLEWVSGISWSGGS |
| | TGYALSVKGRFTISRDNSKNTLYLQMNSLRAEDTAVYYCARTYSGHYGPFFDYWGQG |
| | TLVTVSS |
| 528 | SAWMS |
| 529 | GISWSGGSTGYALSVKG |
| 530 | TYSGHYGPFFDY |
| 531 | QSVLTQPPSASGTPGQRVTISCSGSSSNIGSHTVNWYQQLPGTAPKLLIYRNNQRPSGVP |
| | DRFSGSKSGTSASLAISGLRSEDEADYYCAAWDDSLNGWVFGGGTKLTVL |
| 532 | SGSSSNIGSHTVN |
| 533 | RNNQRPS |
| 534 | AAWDDSLNGWV |
| 535 | GAAGTTCAGCTGCTGGAATCTGGCGGCGGACTGGTTCAACCTGGCGGATCTCTGAG |
| | ACTGAGCTGTGCCGCCAGCGGCTTCACATTTTCTAGCGCCTGGATGAGCTGGGTCC |
| | GACAGGCTCCTGGAAAAGGCCTGGAATGGGTGTCCGGCATCTCTTGGAGCGGCGG |
| | CTCTACAGGATATGCCCTGTCTGTGAAGGGCAGATTCACCATCAGCCGGGACAACA |
| | GCAAGAACACCCTGTACCTGCAGATGAACAGCCTGAGAGCCGAGGACACCGCCGT |
| | GTACTACTGTGCCAGAACATACAGCGGCCACTACGGCCCTTTCTTCGACTATTGGG |
| | GCCAGGGCACACTGGTCACAGTCTCTTCA |
| 536 | AGCGCCTGGATGAGC |
| 537 | GGCATCTCTTGGAGCGGCGGCTCTACAGGATATGCCCTGTCTGTGAAGGGC |
| 538 | ACATACAGCGGCCACTACGGCCCTTTCTTCGACTAT |
| 539 | CAGTCTGTGCTGACTCAGCCACCCTCAGCGTCTGGGACCCCCGGGCAGAGGGTCAC |
| | CATCTCTTGTTCTGGAAGCAGCTCCAACATCGGAAGTCATACTGTAAACTGGTATC |
| | AGCAGCTCCCAGGAACGGCCCCCAAACTCCTCATCTATAGGAATAATCAGCGGCC |
| | CTCAGGGGTCCCTGACCGATTCTCTGGCTCCAAGTCTGGCACCTCAGCCTCCCTGG |
| | CCATCAGTGGGCTCCGGTCCGAGGATGAGGCTGATTATTACTGTGCAGCATGGGAT |
| | GACAGCCTGAATGGTTGGGTGTTCGGCGGAGGAACCAAGCTGACGGTCCTA |
| 540 | TCTGGAAGCAGCTCCAACATCGGAAGTCATACTGTAAAC |
| 541 | AGGAATAATCAGCGGCCCTCA |
| 542 | GCAGCATGGGATGACAGCCTGAATGGTTGGGTG |
| 543 | EVQLLESGGGLVQPGGSLRLSCAASGFTFSSAWMSWVRQAPGKGLEWVSGISWSGGS |
| | TGYALSVKGRFTISRDNSKNTLYLQMNSLRAEDTAVYYCARTYSGHYGPFFDYWGQG |
| | TLVTVSSASTKGPSVFPLAPSSKSTSGGTAALGCLVKDYFPEPVTVSWNSGALTSGVHT |
| | FPAVLQSSGLYSLSSVVTVPSSSLGTQTYICNVNHKPSNTKVDKKVEPKSCDKTHTCPP |
| | CPAPELLGGPSVFLFPPKPKDTLMISRTPEVTCVVVDVSHEDPEVKFNWYVDGVEVHN |
| | AKTKPREEQYNSTYRVVSVLTVLHQDWLNGKEYKCKVSNKALPAPIEKTISKAKGQP |
| | REPQVYTLPPSRDELTKNQVSLTCLVKGFYPSDIAVEWESNGQPENNYKTTPPVLDSD |
| | GSFFLYSKLTVDKSRWQQGNVFSCSVMHEALHNHYTQKSLSLSPGK |
| 544 | QSVLTQPPSASGTPGQRVTISCSGSSSNIGSHTVNWYQQLPGTAPKLLIYRNNQRPSGVP |
| | DRFSGSKSGTSASLAISGLRSEDEADYYCAAWDDSLNGWVFGGGTKLTVLGQPKAAP |
| | SVTLFPPSSEELQANKATLVCLISDFYPGAVTVAWKADSSPVKAGVETTTPSKQSNNK |
| | YAASSYLSLTPEQWKSHRSYSCQVTHEGSTVEKTVAPTECS |
| 545 | EVQLLESGGGLVQPGGSLRLSCAASGFTFSSAWMSWVRQAPGKGLEWVSGISWSGGR |
| | TGYALSVKGRFTISRDNSKNTLYLQMNSLRAEDTAVYYCARTYSGHYGPYFDYWGQ |
| | GTLVTVSS |
| 546 | SAWMS |
| 547 | GISWSGGRTGYALSVKG |
| 548 | TYSGHYGPYFDY |
| 549 | QSVLTQPPSASGTPGQRVTISCSGSSSNIGSHTVNWYQQLPGTAPKLLIYRNNQRPSGVP |
| | DRFSGSKSGTSASLAISGLRSEDEADYYCAAWDDSLNGWVFGGGTKLTVL |
| 550 | SGSSSNIGSHTVN |
| 551 | RNNQRPS |
| 552 | AAWDDSLNGWV |
| 553 | GAAGTTCAGCTGCTGGAATCTGGCGGCGGACTGGTTCAACCTGGCGGATCTCTGAG |
| | ACTGAGCTGTGCCGCCAGCGGCTTCACATTTTCTAGCGCCTGGATGAGCTGGGTCC |
| | GACAGGCTCCTGGAAAAGGCCTGGAATGGGTGTCCGGCATCTCTTGGAGCGGCGG |
| | CAGAACAGGATATGCCCTGTCTGTGAAGGGCAGATTCACCATCAGCCGGGACAAC |
| | AGCAAGAACACCCTGTACCTGCAGATGAACAGCCTGAGAGCCGAGGACACCGCCG |
| | TGTACTACTGTGCCAGAACATACAGCGGCCACTACGGCCCCTACTTCGATTATTGG |
| | GGCCAGGGCACACTGGTCACCGTTTCTTCA |
| 554 | AGCGCCTGGATGAGC |
| 555 | GGCATCTCTTGGAGCGGCGGCAGAACAGGATATGCCCTGTCTGTGAAGGGC |
| 556 | ACATACAGCGGCCACTACGGCCCCTACTTCGATTAT |
| 557 | CAGTCTGTGCTGACTCAGCCACCCTCAGCGTCTGGGACCCCCGGGCAGAGGGTCAC |
| | CATCTCTTGTTCTGGAAGCAGCTCCAACATCGGAAGTCATACTGTAAACTGGTATC |
| | AGCAGCTCCCAGGAACGGCCCCCAAACTCCTCATCTATAGGAATAATCAGCGGCC |
| | CTCAGGGGTCCCTGACCGATTCTCTGGCTCCAAGTCTGGCACCTCAGCCTCCCTGG |
| | CCATCAGTGGGCTCCGGTCCGAGGATGAGGCTGATTATTACTGTGCAGCATGGGAT |
| | GACAGCCTGAATGGTTGGGTGTTCGGCGGAGGAACCAAGCTGACGGTCCTA |
| 558 | TCTGGAAGCAGCTCCAACATCGGAAGTCATACTGTAAAC |
| 559 | AGGAATAATCAGCGGCCCTCA |
| 560 | GCAGCATGGGATGACAGCCTGAATGGTTGGGTG |
| 561 | EVQLLESGGGLVQPGGSLRLSCAASGFTFSSAWMSWVRQAPGKGLEWVSGISWSGGR |
| | TGYALSVKGRFTISRDNSKNTLYLQMNSLRAEDTAVYYCARTYSGHYGPYFDYWGQ |
| | GTLVTVSSASTKGPSVFPLAPSSKSTSGGTAALGCLVKDYFPEPVTVSWNSGALTSGVH |
| | TFPAVLQSSGLYSLSSVVTVPSSSLGTQTYICNVNHKPSNTKVDKKVEPKSCDKTHTCP |
| | PCPAPELLGGPSVFLFPPKPKDTLMISRTPEVTCVVVDVSHEDPEVKFNWYVDGVEVH |
| | NAKTKPREEQYNSTYRVVSVLTVLHQDWLNGKEYKCKVSNKALPAPIEKTISKAKGQ |
| | PREPQVYTLPPSRDELTKNQVSLTCLVKGFYPSDIAVEWESNGQPENNYKTTPPVLDSD |
| | GSFFLYSKLTVDKSRWQQGNVFSCSVMHEALHNHYTQKSLSLSPGK |
| 562 | QSVLTQPPSASGTPGQRVTISCSGSSSNIGSHTVNWYQQLPGTAPKLLIYRNNQRPSGVP |
| | DRFSGSKSGTSASLAISGLRSEDEADYYCAAWDDSLNGWVFGGGTKLTVLGQPKAAP |
| | SVTLFPPSSEELQANKATLVCLISDFYPGAVTVAWKADSSPVKAGVETTTPSKQSNNK |
| | YAASSYLSLTPEQWKSHRSYSCQVTHEGSTVEKTVAPTECS |
| 563 | EVQLLESGGGLVQPGGSLRLSCAASGFTFSSYAMSWVRQAPGKGLEWVSGIRWNNGS |
| | KGYAGSVKGRFTISRDNSKNTLYLQMNSLRAEDTAVYYCARSGNYYYGYHGMDVW |
| | GQGTLVTVSS |
| 564 | SYAMS |
| 565 | GIRWNNGSKGYAGSVKG |
| 566 | SGNYYYGYHGMDV |
| 567 | QSVLTQPPSASGTPGQRVTISCSGGNSNIGTYFVSWYQQLPGTAPKLLIYTNNQRPSGV |
| | PDRFSGSKSGTSASLAISGLRSEDEADYYCETWDSNTRVFGGGTKLTVL |
| 568 | SGGNSNIGTYFVS |
| 569 | TNNQRPS |
| 570 | ETWDSNTRV |
| 571 | GAAGTTCAGCTGCTGGAATCTGGCGGCGGACTGGTTCAACCTGGCGGATCTCTGAG |
| | ACTGAGCTGTGCCGCCAGCGGCTTCACCTTTAGCAGCTACGCCATGAGCTGGGTCC |
| | GACAGGCTCCTGGCAAAGGCCTTGAATGGGTGTCCGGCATCAGATGGAACAACGG |
| | CAGCAAGGGCTATGCCGGCTCTGTGAAGGGCAGATTCACCATCAGCCGGGACAAC |
| | AGCAAGAACACCCTGTACCTGCAGATGAACAGCCTGAGAGCCGAGGACACCGCCG |
| | TGTACTACTGTGCCAGAAGCGGCAACTACTACTACGGCTACCACGGCATGGATGTG |
| | TGGGGCCAGGGAACACTGGTTACCGTTTCTTCA |
| 572 | AGCTACGCCATGAGC |
| 573 | GGCATCAGATGGAACAACGGCAGCAAGGGCTATGCCGGCTCTGTGAAGGGC |
| 574 | AGCGGCAACTACTACTACGGCTACCACGGCATGGATGTG |
| 575 | CAGTCTGTTCTGACACAGCCTCCTAGCGCCTCTGGCACACCTGGACAGAGAGTGAC |
| | CATCAGCTGTAGCGGCGGCAACAGCAACATCGGCACCTACTTCGTGTCCTGGTATC |
| | AGCAGCTGCCTGGCACAGCCCCTAAACTGCTGATCTACACCAACAACCAGCGGCCT |
| | AGCGGCGTGCCCGATAGATTTTCTGGCAGCAAGAGCGGCACAAGCGCCAGCCTGG |
| | CTATCTCTGGACTGAGATCTGAGGACGAGGCCGACTACTACTGCGAGACATGGGA |
| | CAGCAACACCAGAGTGTTTGGCGGAGGCACCAAGCTGACAGTGCTA |
| 576 | AGCGGCGGCAACAGCAACATCGGCACCTACTTCGTGTCC |
| 577 | ACCAACAACCAGCGGCCTAGC |
| 578 | GAGACATGGGACAGCAACACCAGAGTG |
| 579 | EVQLLESGGGLVQPGGSLRLSCAASGFTFSSYAMSWVRQAPGKGLEWVSGIRWNNGS |
| | KGYAGSVKGRFTISRDNSKNTLYLQMNSLRAEDTAVYYCARSGNYYYGYHGMDVW |
| | GQGTLVTVSSASTKGPSVFPLAPSSKSTSGGTAALGCLVKDYFPEPVTVSWNSGALTSG |
| | VHTFPAVLQSSGLYSLSSVVTVPSSSLGTQTYICNVNHKPSNTKVDKKVEPKSCDKTHT |
| | CPPCPAPELLGGPSVFLFPPKPKDTLMISRTPEVTCVVVDVSHEDPEVKFNWYVDGVE |
| | VHNAKTKPREEQYNSTYRVVSVLTVLHQDWLNGKEYKCKVSNKALPAPIEKTISKAK |
| | GQPREPQVYTLPPSRDELTKNQVSLTCLVKGFYPSDIAVEWESNGQPENNYKTTPPVL |
| | DSDGSFFLYSKLTVDKSRWQQGNVFSCSVMHEALHNHYTQKSLSLSPGK |
| 580 | QSVLTQPPSASGTPGQRVTISCSGGNSNIGTYFVSWYQQLPGTAPKLLIYTNNQRPSGV |
| | PDRFSGSKSGTSASLAISGLRSEDEADYYCETWDSNTRVFGGGTKLTVLGQPKAAPSV |
| | TLFPPSSEELQANKATLVCLISDFYPGAVTVAWKADSSPVKAGVETTTPSKQSNNKYA |
| | ASSYLSLTPEQWKSHRSYSCQVTHEGSTVEKTVAPTECS |
| 581 | EVQLLESGGGLVQPGGSLRLSCAASGFTFSSYAMSWVRQAPGKGLEWVSGIRWNNGS |
| | KGYAGSVKGRFTISRDNSKNTLYLQMNSLRAEDTAVYYCARSGNEYYGYHGMDVW |
| | GQGTLVTVSS |
| 582 | SYAMS |
| 583 | GIRWNNGSKGYAGSVKG |
| 584 | SGNEYYGYHGMDV |
| 585 | QSVLTQPPSASGTPGQRVTISCSGGNSNIGTYFVSWYQQLPGTAPKLLIYTNNQRPSGV |
| | PDRFSGSKSGTSASLAISGLRSEDEADYYCETWDSNTRVFGGGTKLTVL |
| 586 | SGGNSNIGTYFVS |
| 587 | TNNQRPS |
| 588 | ETWDSNTRV |
| 589 | GAAGTTCAGCTGCTGGAATCTGGCGGCGGACTGGTTCAACCTGGCGGATCTCTGAG |
| | ACTGAGCTGTGCCGCCAGCGGCTTCACCTTTAGCAGCTACGCCATGAGCTGGGTCC |
| | GACAGGCTCCTGGCAAAGGCCTTGAATGGGTGTCCGGCATCAGATGGAACAACGG |
| | CAGCAAGGGCTATGCCGGCTCTGTGAAGGGCAGATTCACCATCAGCCGGGACAAC |
| | AGCAAGAACACCCTGTACCTGCAGATGAACAGCCTGAGAGCCGAGGACACCGCCG |
| | TGTACTACTGTGCCAGAAGCGGCAACGAGTACTACGGCTACCACGGCATGGATGT |
| | GTGGGGCCAGGGAACACTGGTTACCGTTTCTTCA |
| 590 | AGCTACGCCATGAGC |
| 591 | GGCATCAGATGGAACAACGGCAGCAAGGGCTATGCCGGCTCTGTGAAGGGC |
| 592 | AGCGGCAACGAGTACTACGGCTACCACGGCATGGATGTG |
| 593 | CAGTCTGTTCTGACACAGCCTCCTAGCGCCTCTGGCACACCTGGACAGAGAGTGAC |
| | CATCAGCTGTAGCGGCGGCAACAGCAACATCGGCACCTACTTCGTGTCCTGGTATC |
| | AGCAGCTGCCTGGCACAGCCCCTAAACTGCTGATCTACACCAACAACCAGCGGCCT |
| | AGCGGCGTGCCCGATAGATTTTCTGGCAGCAAGAGCGGCACAAGCGCCAGCCTGG |
| | CTATCTCTGGACTGAGATCTGAGGACGAGGCCGACTACTACTGCGAGACATGGGA |
| | CAGCAACACCAGAGTGTTTGGCGGAGGCACCAAGCTGACAGTGCTA |
| 594 | AGCGGCGGCAACAGCAACATCGGCACCTACTTCGTGTCC |
| 595 | ACCAACAACCAGCGGCCTAGC |
| 596 | GAGACATGGGACAGCAACACCAGAGTG |
| 597 | EVQLLESGGGLVQPGGSLRLSCAASGFTFSSYAMSWVRQAPGKGLEWVSGIRWNNGS |
| | KGYAGSVKGRFTISRDNSKNTLYLQMNSLRAEDTAVYYCARSGNEYYGYHGMDVW |
| | GQGTLVTVSSASTKGPSVFPLAPSSKSTSGGTAALGCLVKDYFPEPVTVSWNSGALTSG |
| | VHTFPAVLQSSGLYSLSSVVTVPSSSLGTQTYICNVNHKPSNTKVDKKVEPKSCDKTHT |
| | CPPCPAPELLGGPSVFLFPPKPKDTLMISRTPEVTCVVVDVSHEDPEVKFNWYVDGVE |
| | VHNAKTKPREEQYNSTYRVVSVLTVLHQDWLNGKEYKCKVSNKALPAPIEKTISKAK |
| | GQPREPQVYTLPPSRDELTKNQVSLTCLVKGFYPSDIAVEWESNGQPENNYKTTPPVL |
| | DSDGSFFLYSKLTVDKSRWQQGNVFSCSVMHEALHNHYTQKSLSLSPGK |
| 598 | QSVLTQPPSASGTPGQRVTISCSGGNSNIGTYFVSWYQQLPGTAPKLLIYTNNQRPSGV |
| | PDRFSGSKSGTSASLAISGLRSEDEADYYCETWDSNTRVFGGGTKLTVLGQPKAAPSV |
| | TLFPPSSEELQANKATLVCLISDFYPGAVTVAWKADSSPVKAGVETTTPSKQSNNKYA |
| | ASSYLSLTPEQWKSHRSYSCQVTHEGSTVEKTVAPTECS |
| 599 | EVQLLESGGGLVQPGGSLRLSCAASGFTFSSYGMHWVRQAPGKGLEWVSAINWNGGS |
| | TGYADSVKGRFTISRDNSKNTLYLQMNSLRAEDTAVYYCARGHHSGYDGRFFDYWG |
| | QGTLVTVSS |
| 600 | SYGMH |
| 601 | AINWNGGSTGYADSVKG |
| 602 | GHHSGYDGRFFDY |
| 603 | QSVLTQPPSVSGAPGQRVTISCTGSSSNIGAGYNVHWYQQLPGTAPKLLIYTNNRRPSG |
| | VPDRFSGSKSGTSASLAISGLRSEDEADYYCAAWDASLSGWVFGGGTKLTVL |
| 604 | TGSSSNIGAGYNVH |
| 605 | TNNRRPS |
| 606 | AAWDASLSGWV |
| 607 | GAAGTTCAGCTGCTGGAATCTGGCGGCGGACTGGTTCAACCTGGCGGATCTCTGAG |
| | ACTGAGCTGTGCCGCCAGCGGCTTCACCTTTAGCAGCTATGGCATGCACTGGGTCC |
| | GACAGGCCCCTGGCAAAGGACTTGAATGGGTGTCCGCCATCAACTGGAATGGCGG |
| | CTCTACAGGCTACGCCGACTCTGTGAAGGGCAGATTCACCATCAGCCGGGACAAC |
| | AGCAAGAACACCCTGTACCTGCAGATGAACTCCCTGAGAGCCGAGGACACCGCCG |
| | TGTACTATTGTGCCAGAGGCCACCACAGCGGCTACGACGGCAGATTCTTTGACTAT |
| | TGGGGCCAGGGCACCCTGGTCACAGTTTCTTCA |
| 608 | AGCTATGGCATGCAC |
| 609 | GCCATCAACTGGAATGGCGGCTCTACAGGCTACGCCGACTCTGTGAAGGGC |
| 610 | GGCCACCACAGCGGCTACGACGGCAGATTCTTTGACTAT |
| 611 | CAGTCTGTTCTGACACAGCCTCCATCTGTGTCTGGCGCCCCTGGACAGAGAGTGAC |
| | CATCAGCTGTACAGGCAGCAGCTCCAATATCGGAGCCGGCTACAACGTGCACTGG |
| | TATCAGCAGCTGCCTGGCACAGCCCCTAAACTGCTGATCTACACCAACAACAGACG |
| | GCCCAGCGGCGTGCCCGATAGATTTTCTGGCAGCAAGAGCGGCACAAGCGCCAGC |
| | CTGGCTATCTCTGGACTGAGATCTGAGGACGAGGCCGACTACTATTGCGCCGCCTG |
| | GGATGCTTCTCTGAGCGGATGGGTTTTCGGCGGAGGCACCAAACTGACAGTGCTA |
| 612 | ACAGGCAGCAGCTCCAATATCGGAGCCGGCTACAACGTGCAC |
| 613 | ACCAACAACAGACGGCCCAGC |
| 614 | GCCGCCTGGGATGCTTCTCTGAGCGGATGGGTT |
| 615 | EVQLLESGGGLVQPGGSLRLSCAASGFTFSSYGMHWVRQAPGKGLEWVSAINWNGGS |
| | TGYADSVKGRFTISRDNSKNTLYLQMNSLRAEDTAVYYCARGHHSGYDGRFFDYWG |
| | QGTLVTVSSASTKGPSVFPLAPSSKSTSGGTAALGCLVKDYFPEPVTVSWNSGALTSGV |
| | HTFPAVLQSSGLYSLSSVVTVPSSSLGTQTYICNVNHKPSNTKVDKKVEPKSCDKTHTC |
| | PPCPAPELLGGPSVFLFPPKPKDTLMISRTPEVTCVVVDVSHEDPEVKFNWYVDGVEV |
| | HNAKTKPREEQYNSTYRVVSVLTVLHQDWLNGKEYKCKVSNKALPAPIEKTISKAKG |
| | QPREPQVYTLPPSRDELTKNQVSLTCLVKGFYPSDIAVEWESNGQPENNYKTTPPVLDS |
| | DGSFFLYSKLTVDKSRWQQGNVFSCSVMHEALHNHYTQKSLSLSPG |
| 616 | QSVLTQPPSVSGAPGQRVTISCTGSSSNIGAGYNVHWYQQLPGTAPKLLIYTNNRRPSG |
| | VPDRFSGSKSGTSASLAISGLRSEDEADYYCAAWDASLSGWVFGGGTKLTVLGQPKA |
| | APSVTLFPPSSEELQANKATLVCLISDFYPGAVTVAWKADSSPVKAGVETTTPSKQSNN |
| | KYAASSYLSLTPEQWKSHRSYSCQVTHEGSTVEKTVAPTECS |
| 617 | EVQLLESGGGLVQPGGSLRLSCAASGFTFSSYGMHWVRQAPGKGLEWVSAINWNGGS |
| | TGYADSVKGRFTISRDNSKNTLYLQMNSLRAEDTAVYYCARGHHSGYDGRFFDYWG |
| | QGTLVTVSS |
| 618 | SYGMH |
| 619 | AINWNGGSTGYADSVKG |
| 620 | GHHSGYDGRFFDY |
| 621 | QSVLTQPPSVSGAPGQRVTISCTGSSSNIGAGYNVHWYQQLPGTAPKLLIYTNNRRPSG |
| | VPDRFSGSKSGTSASLAISGLRSEDEADYYCAAWDASLSGWVFGGGTKLTVL |
| 622 | TGSSSNIGAGYNVH |
| 623 | TNNRRPS |
| 624 | AAWDASLSGWV |
| 625 | GAGGTGCAGCTGCTGGAATCTGGCGGAGGATTGGTTCAGCCTGGCGGCTCTCTGAG |
| | ACTGTCTTGTGCCGCTTCCGGCTTCACCTTCTCCAGCTACGGAATGCACTGGGTCCG |
| | ACAGGCCCCTGGCAAAGGATTGGAATGGGTGTCCGCCATCAACTGGAACGGCGGC |
| | TCTACCGGCTACGCCGATTCTGTGAAGGGCAGATTCACCATCAGCCGGGACAACTC |
| | CAAGAACACCCTGTACCTGCAGATGAACTCCCTGAGAGCCGAGGACACCGCCGTG |
| | TACTATTGTGCTAGAGGCCACCACTCTGGCTACGACGGCAGATTCTTCGACTATTG |
| | GGGCCAGGGCACCCTGGTCACAGTTTCTTCA |
| 626 | AGCTACGGAATGCAC |
| 627 | GCCATCAACTGGAACGGCGGCTCTACCGGCTACGCCGATTCTGTGAAGGGC |
| 628 | GGCCACCACTCTGGCTACGACGGCAGATTCTTCGACTAT |
| 629 | CAGTCTGTTCTGACACAGCCTCCATCTGTGTCTGGCGCCCCTGGACAGAGAGTGAC |
| | CATCAGCTGTACAGGCAGCAGCTCCAATATCGGAGCCGGCTACAACGTGCACTGG |
| | TATCAGCAGCTGCCTGGCACAGCCCCTAAACTGCTGATCTACACCAACAACAGACG |
| | GCCCAGCGGCGTGCCCGATAGATTTTCTGGCAGCAAGAGCGGCACAAGCGCCAGC |
| | CTGGCTATCTCTGGACTGAGATCTGAGGACGAGGCCGACTACTATTGCGCCGCCTG |
| | GGATGCTTCTCTGAGCGGATGGGTTTTCGGCGGAGGCACCAAACTGACAGTGCTA |
| 630 | ACAGGCAGCAGCTCCAATATCGGAGCCGGCTACAACGTGCAC |
| 631 | ACCAACAACAGACGGCCCAGC |
| 632 | GCCGCCTGGGATGCTTCTCTGAGCGGATGGGTT |
| 633 | EVQLLESGGGLVQPGGSLRLSCAASGFTFSSYGMHWVRQAPGKGLEWVSAINWNGGS |
| | TGYADSVKGRFTISRDNSKNTLYLQMNSLRAEDTAVYYCARGHHSGYDGRFFDYWG |
| | QGTLVTVSSASTKGPSVFPLAPSSKSTSGGTAALGCLVKDYFPEPVTVSWNSGALTSGV |
| | HTFPAVLQSSGLYSLSSVVTVPSSSLGTQTYICNVNHKPSNTKVDKKVEPKSCDKTHTC |
| | PPCPAPELLGGPSVFLFPPKPKDTLMISRTPEVTCVVVDVSHEDPEVKFNWYVDGVEV |
| | HNAKTKPREEQYNSTYRVVSVLTVLHQDWLNGKEYKCKVSNKALPAPIEKTISKAKG |
| | QPREPQVYTLPPSRDELTKNQVSLTCLVKGFYPSDIAVEWESNGQPENNYKTTPPVLDS |
| | DGSFFLYSKLTVDKSRWQQGNVFSCSVMHEALHNHYTQKSLSLSPGK |
| 634 | QSVLTQPPSVSGAPGQRVTISCTGSSSNIGAGYNVHWYQQLPGTAPKLLIYTNNRRPSG |
| | VPDRFSGSKSGTSASLAISGLRSEDEADYYCAAWDASLSGWVFGGGTKLTVLGQPKA |
| | APSVTLFPPSSEELQANKATLVCLISDFYPGAVTVAWKADSSPVKAGVETTTPSKQSNN |
| | KYAASSYLSLTPEQWKSHRSYSCQVTHEGSTVEKTVAPTECS |
| 660 | EVQLLESGGGLVQPGGSLRLSCAASGFTFSSYGMHWVRQAPGKGLEWVSGINWNGGS |
| | TGYADSVKGRFTISRDNSKNTLYLQMNSLRAEDTAVYYCARGHHSGYDGRFFDYWG |
| | QGTLVTVSS |
| 661 | SYGMH |
| 662 | GINWNGGSTGYADSVKG |
| 663 | GHHSGYDGRFFDY |
| 664 | QSVLTQPPSVSGAPGQRVTISCTGSSSNIGAGYNVHWYQQLPGTAPKLLIYTNNRRPSG |
| | VPDRFSGSKSGTSASLAISGLRSEDEADYYCAAWDASLSGWVFGGGTKLTVL |
| 665 | TGSSSNIGAGYNVH |
| 666 | TNNRRPS |
| 667 | AAWDASLSGWV |
| 668 | GAAGTTCAGCTGCTGGAATCTGGCGGCGGACTGGTTCAACCTGGCGGATCTCTGAG |
| | ACTGAGCTGTGCCGCCAGCGGCTTCACCTTTAGCAGCTATGGCATGCACTGGGTCC |
| | GACAGGCCCCTGGCAAAGGACTTGAATGGGTGTCCGGCATCAACTGGAATGGCGG |
| | CTCTACAGGCTACGCCGACTCTGTGAAGGGCAGATTCACCATCAGCCGGGACAAC |
| | AGCAAGAACACCCTGTACCTGCAGATGAACTCCCTGAGAGCCGAGGACACCGCCG |
| | TGTACTATTGTGCCAGAGGCCACCACAGCGGCTACGACGGCAGATTCTTTGACTAT |
| | TGGGGCCAGGGCACCCTGGTCACAGTTTCTTCA |
| 669 | AGCTATGGCATGCAC |
| 670 | GGCATCAACTGGAATGGCGGCTCTACAGGCTACGCCGACTCTGTGAAGGGC |
| 671 | GGCCACCACAGCGGCTACGACGGCAGATTCTTTGACTAT |
| 672 | CAGTCTGTTCTGACACAGCCTCCATCTGTGTCTGGCGCCCCTGGACAGAGAGTGAC |
| | CATCAGCTGTACAGGCAGCAGCTCCAATATCGGAGCCGGCTACAACGTGCACTGG |
| | TATCAGCAGCTGCCTGGCACAGCCCCTAAACTGCTGATCTACACCAACAACAGACG |
| | GCCCAGCGGCGTGCCCGATAGATTTTCTGGCAGCAAGAGCGGCACAAGCGCCAGC |
| | CTGGCTATCTCTGGACTGAGATCTGAGGACGAGGCCGACTACTATTGCGCCGCCTG |
| | GGATGCTTCTCTGAGCGGATGGGTTTTCGGCGGAGGCACCAAACTGACAGTGCTA |
| 673 | ACAGGCAGCAGCTCCAATATCGGAGCCGGCTACAACGTGCAC |
| 674 | ACCAACAACAGACGGCCCAGC |
| 675 | GCCGCCTGGGATGCTTCTCTGAGCGGATGGGTT |
| 676 | EVQLLESGGGLVQPGGSLRLSCAASGFTFSSYGMHWVRQAPGKGLEWVSGINWNGGS |
| | TGYADSVKGRFTISRDNSKNTLYLQMNSLRAEDTAVYYCARGHHSGYDGRFFDYWG |
| | QGTLVTVSSASTKGPSVFPLAPSSKSTSGGTAALGCLVKDYFPEPVTVSWNSGALTSGV |
| | HTFPAVLQSSGLYSLSSVVTVPSSSLGTQTYICNVNHKPSNTKVDKKVEPKSCDKTHTC |
| | PPCPAPELLGGPSVFLFPPKPKDTLMISRTPEVTCVVVDVSHEDPEVKFNWYVDGVEV |
| | HNAKTKPREEQYNSTYRVVSVLTVLHQDWLNGKEYKCKVSNKALPAPIEKTISKAKG |
| | QPREPQVYTLPPSRDELTKNQVSLTCLVKGFYPSDIAVEWESNGQPENNYKTTPPVLDS |
| | DGSFFLYSKLTVDKSRWQQGNVFSCSVMHEALHNHYTQKSLSLSPGK |
| 677 | QSVLTQPPSVSGAPGQRVTISCTGSSSNIGAGYNVHWYQQLPGTAPKLLIYTNNRRPSG |
| | APSVTLFPPSSEELQANKATLVCLISDFYPGAVTVAWKADSSPVKAGVETTTPSKQSNN |
| | KYAASSYLSLTPEQWKSHRSYSCQVTHEGSTVEKTVAPTECS |
| | GAAGTTCAGCTGCTGGAATCTGGCGGCGGACTGGTTCAACCTGGCGGATCTCTGAG |
| | ACTGAGCTGTGCCGCCAGCGGCTTCACCTTTAGCAGCTATGGCATGCACTGGGTCC |
| | GACAGGCCCCTGGCAAAGGACTTGAATGGGTGTCCGGCATCAACTGGAATGGCGG |
| | CTCTACAGGCTACGCCGACTCTGTGAAGGGCAGATTCACCATCAGCCGGGACAAC |
| | AGCAAGAACACCCTGTACCTGCAGATGAACTCCCTGAGAGCCGAGGACACCGCCG |
| | TGTACTATTGTGCCAGAGGCCACCACAGCGGCTACGACGGCAGATTCTTTGACTAT |
| | TGGGGCCAGGGCACCCTGGTCACAGTTTCTTCAGCCAGCACCAAGGGCCCCAGCGT |
| | GTTCCCTCTGGCCCCTAGCAGCAAGAGCACATCTGGCGGAACAGCCGCCCTGGGCT |
| | GCCTCGTGAAGGACTACTTTCCCGAGCCCGTGACCGTGTCCTGGAACTCTGGCGCT |
| | CTGACAAGCGGCGTGCACACCTTTCCAGCCGTGCTGCAGAGCAGCGGCCTGTACTC |
| | TCTGAGCAGCGTCGTGACAGTGCCCAGCAGCTCTCTGGGCACCCAGACCTACATCT |
| | GCAACGTGAACCACAAGCCCAGCAACACCAAGGTGGACAAGAAGGTGGAACCCA |
| | AGAGCTGCGACAAGACCCACACCTGTCCCCCTTGTCCTGCCCCCGAACTGCTGGGA |
| | GGCCCTTCCGTGTTCCTGTTCCCCCCAAAGCCCAAGGACACCCTGATGATCAGCCG |
| | GACCCCCGAAGTGACCTGCGTGGTGGTGGATGTGTCCCACGAGGACCCTGAAGTG |
| | AAGTTCAATTGGTACGTGGACGGCGTGGAAGTGCACAACGCCAAGACCAAGCCTA |
| | GAGAGGAACAGTACAACAGCACCTACCGGGTGGTGTCCGTGCTGACAGTGCTGCA |
| | CCAGGACTGGCTGAACGGCAAAGAGTACAAGTGCAAGGTGTCCAACAAGGCCCTG |
| | CCTGCCCCCATCGAGAAAACCATCAGCAAGGCCAAGGGCCAGCCCCGCGAACCCC |
| | AGGTGTACACACTGCCCCCAAGCAGGGACGAGCTGACCAAGAACCAGGTGTCCCT |
| | GACCTGTCTCGTGAAAGGCTTCTACCCCTCCGATATCGCCGTGGAATGGGAGAGCA |
| | ACGGCCAGCCCGAGAACAACTACAAGACCACCCCCCCTGTGCTGGACAGCGACGG |
| | CTCATTCTTCCTGTACAGCAAGCTGACCGTGGACAAGTCCCGGTGGCAGCAGGGCA |
| | ACGTGTTCAGCTGCAGCGTGATGCACGAGGCCCTGCACAACCACTACACCCAGAA |
| | GTCCCTGAGCCTGAGCCCTGGCAAG |
| 678 | VPDRFSGSKSGTSASLAISGLRSEDEADYYCAAWDASLSGWVFGGGTKLTVLGQPKA |
| 679 | CAGTCTGTTCTGACACAGCCTCCATCTGTGTCTGGCGCCCCTGGACAGAGAGTGAC |
| | CATCAGCTGTACAGGCAGCAGCTCCAATATCGGAGCCGGCTACAACGTGCACTGG |
| | TATCAGCAGCTGCCTGGCACAGCCCCTAAACTGCTGATCTACACCAACAACAGACG |
| | GCCCAGCGGCGTGCCCGATAGATTTTCTGGCAGCAAGAGCGGCACAAGCGCCAGC |
| | CTGGCTATCTCTGGACTGAGATCTGAGGACGAGGCCGACTACTATTGCGCCGCCTG |
| | GGATGCTTCTCTGAGCGGATGGGTTTTCGGCGGAGGCACCAAACTGACAGTGCTAG |
| | GCCAGCCTAAAGCCGCCCCTAGCGTGACCCTGTTCCCTCCAAGCAGCGAGGAACTG |
| | CAGGCCAACAAGGCCACCCTCGTGTGCCTGATCAGCGACTTCTATCCTGGCGCCGT |
| | GACCGTGGCCTGGAAGGCCGATAGCTCTCCTGTGAAGGCCGGCGTGGAAACCACC |
| | ACCCCTAGCAAGCAGAGCAACAACAAATACGCCGCCAGCAGCTACCTGAGCCTGA |
| | CCCCCGAGCAGTGGAAGTCCCACAGATCCTACAGCTGCCAAGTGACCCACGAGGG |
| | CAGCACCGTGGAAAAGACAGTGGCCCCTACCGAGTGCAGC |
| 680 | EVQLLESGGGLVQPGGSLRLSCAASGFTFSSYGMHWVRQAPGKGLEWVSAINWNGGS |
| | TGYADSVKGRFTISRDNSKNTLYLQMNSLRAEDTAVYYCARGHHSGYDGRFFDYWG |
| | QGTLVTVSS |
| 681 | SYGMH |
| 682 | AINWNGGSTGYADSVKG |
| 683 | GHHSGYDGRFFDY |
| 684 | QSVLTQPPSASGAPGQRVTISCTGSSSNIGAGYNVHWYQQLPGTAPKLLIYTNNRRPSG |
| | VPDRFSGSKSGTSASLAISGLRSEDEADYYCAAWDASLSGWVFGGGTKLTVL |
| 685 | TGSSSNIGAGYNVH |
| 686 | TNNRRPS |
| 687 | AAWDASLSGWV |
| 688 | GAAGTTCAGCTGCTGGAATCTGGCGGCGGACTGGTTCAACCTGGCGGATCTCTGAG |
| | ACTGAGCTGTGCCGCCAGCGGCTTCACCTTTAGCAGCTATGGCATGCACTGGGTCC |
| | GACAGGCCCCTGGCAAAGGACTTGAATGGGTGTCCGCCATCAACTGGAATGGCGG |
| | CTCTACAGGCTACGCCGACTCTGTGAAGGGCAGATTCACCATCAGCCGGGACAAC |
| | AGCAAGAACACCCTGTACCTGCAGATGAACTCCCTGAGAGCCGAGGACACCGCCG |
| | TGTACTATTGTGCCAGAGGCCACCACAGCGGCTACGACGGCAGATTCTTTGACTAT |
| | TGGGGCCAGGGCACCCTGGTCACAGTTTCTTCA |
| 689 | AGCTATGGCATGCAC |
| 690 | GCCATCAACTGGAATGGCGGCTCTACAGGCTACGCCGACTCTGTGAAGGGC |
| 691 | GGCCACCACAGCGGCTACGACGGCAGATTCTTTGACTAT |
| 692 | CAGTCTGTTCTGACACAGCCTCCATCTGCTAGCGGAGCCCCTGGACAGAGAGTGAC |
| | CATCAGCTGTACAGGCAGCAGCTCCAATATCGGAGCCGGCTACAACGTGCACTGG |
| | TATCAGCAGCTGCCTGGCACAGCCCCTAAACTGCTGATCTACACCAACAACAGACG |
| | GCCCAGCGGCGTGCCCGATAGATTTTCTGGCAGCAAGAGCGGCACAAGCGCCAGC |
| | CTGGCTATCTCTGGACTGAGATCTGAGGACGAGGCCGACTACTATTGCGCCGCCTG |
| | GGATGCTTCTCTGAGCGGATGGGTTTTCGGCGGAGGCACCAAACTGACAGTGCTA |
| 693 | ACAGGCAGCAGCTCCAATATCGGAGCCGGCTACAACGTGCAC |
| 694 | ACCAACAACAGACGGCCCAGC |
| 695 | GCCGCCTGGGATGCTTCTCTGAGCGGATGGGTT |
| 696 | EVQLLESGGGLVQPGGSLRLSCAASGFTFSSYGMHWVRQAPGKGLEWVSAINWNGGS |
| | TGYADSVKGRFTISRDNSKNTLYLQMNSLRAEDTAVYYCARGHHSGYDGRFFDYWG |
| | QGTLVTVSSASTKGPSVFPLAPSSKSTSGGTAALGCLVKDYFPEPVTVSWNSGALTSGV |
| | HTFPAVLQSSGLYSLSSVVTVPSSSLGTQTYICNVNHKPSNTKVDKKVEPKSCDKTHTC |
| | PPCPAPELLGGPSVFLFPPKPKDTLMISRTPEVTCVVVDVSHEDPEVKFNWYVDGVEV |
| | HNAKTKPREEQYNSTYRVVSVLTVLHQDWLNGKEYKCKVSNKALPAPIEKTISKAKG |
| | QPREPQVYTLPPSRDELTKNQVSLTCLVKGFYPSDIAVEWESNGQPENNYKTTPPVLDS |
| | DGSFFLYSKLTVDKSRWQQGNVFSCSVMHEALHNHYTQKSLSLSPGK |
| 697 | QSVLTQPPSASGAPGQRVTISCTGSSSNIGAGYNVHWYQQLPGTAPKLLIYTNNRRPSG |
| | VPDRFSGSKSGTSASLAISGLRSEDEADYYCAAWDASLSGWVFGGGTKLTVLGQPKA |
| | APSVTLFPPSSEELQANKATLVCLISDFYPGAVTVAWKADSSPVKAGVETTTPSKQSNN |
| | KYAASSYLSLTPEQWKSHRSYSCQVTHEGSTVEKTVAPTECS |
| 698 | GAAGTTCAGCTGCTGGAATCTGGCGGCGGACTGGTTCAACCTGGCGGATCTCTGAG |
| | ACTGAGCTGTGCCGCCAGCGGCTTCACCTTTAGCAGCTATGGCATGCACTGGGTCC |
| | GACAGGCCCCTGGCAAAGGACTTGAATGGGTGTCCGCCATCAACTGGAATGGCGG |
| | CTCTACAGGCTACGCCGACTCTGTGAAGGGCAGATTCACCATCAGCCGGGACAAC |
| | AGCAAGAACACCCTGTACCTGCAGATGAACTCCCTGAGAGCCGAGGACACCGCCG |
| | TGTACTATTGTGCCAGAGGCCACCACAGCGGCTACGACGGCAGATTCTTTGACTAT |
| | TGGGGCCAGGGCACCCTGGTCACAGTTTCTTCAGCCAGCACCAAGGGCCCCAGCGT |
| | GTTCCCTCTGGCCCCTAGCAGCAAGAGCACATCTGGCGGAACAGCCGCCCTGGGCT |
| | GCCTCGTGAAGGACTACTTTCCCGAGCCCGTGACCGTGTCCTGGAACTCTGGCGCT |
| | CTGACAAGCGGCGTGCACACCTTTCCAGCCGTGCTGCAGAGCAGCGGCCTGTACTC |
| | TCTGAGCAGCGTCGTGACAGTGCCCAGCAGCTCTCTGGGCACCCAGACCTACATCT |
| | GCAACGTGAACCACAAGCCCAGCAACACCAAGGTGGACAAGAAGGTGGAACCCA |
| | AGAGCTGCGACAAGACCCACACCTGTCCCCCTTGTCCTGCCCCCGAACTGCTGGGA |
| | GGCCCTTCCGTGTTCCTGTTCCCCCCAAAGCCCAAGGACACCCTGATGATCAGCCG |
| | GACCCCCGAAGTGACCTGCGTGGTGGTGGATGTGTCCCACGAGGACCCTGAAGTG |
| | AAGTTCAATTGGTACGTGGACGGCGTGGAAGTGCACAACGCCAAGACCAAGCCTA |
| | GAGAGGAACAGTACAACAGCACCTACCGGGTGGTGTCCGTGCTGACAGTGCTGCA |
| | CCAGGACTGGCTGAACGGCAAAGAGTACAAGTGCAAGGTGTCCAACAAGGCCCTG |
| | CCTGCCCCCATCGAGAAAACCATCAGCAAGGCCAAGGGCCAGCCCCGCGAACCCC |
| | AGGTGTACACACTGCCCCCAAGCAGGGACGAGCTGACCAAGAACCAGGTGTCCCT |
| | GACCTGTCTCGTGAAAGGCTTCTACCCCTCCGATATCGCCGTGGAATGGGAGAGCA |
| | ACGGCCAGCCCGAGAACAACTACAAGACCACCCCCCCTGTGCTGGACAGCGACGG |
| | CTCATTCTTCCTGTACAGCAAGCTGACCGTGGACAAGTCCCGGTGGCAGCAGGGCA |
| | ACGTGTTCAGCTGCAGCGTGATGCACGAGGCCCTGCACAACCACTACACCCAGAA |
| | GTCCCTGAGCCTGAGCCCTGGCAAG |
| 699 | CAGTCTGTTCTGACACAGCCTCCATCTGCTAGCGGAGCCCCTGGACAGAGAGTGAC |
| | TATCAGCAGCTGCCTGGCACAGCCCCTAAACTGCTGATCTACACCAACAACAGACG |
| | GCCCAGCGGCGTGCCCGATAGATTTTCTGGCAGCAAGAGCGGCACAAGCGCCAGC |
| | CTGGCTATCTCTGGACTGAGATCTGAGGACGAGGCCGACTACTATTGCGCCGCCTG |
| | GGATGCTTCTCTGAGCGGATGGGTTTTCGGCGGAGGCACCAAACTGACAGTGCTAG |
| | GCCAGCCTAAAGCCGCCCCTAGCGTGACCCTGTTCCCTCCAAGCAGCGAGGAACTG |
| | CAGGCCAACAAGGCCACCCTCGTGTGCCTGATCAGCGACTTCTATCCTGGCGCCGT |
| | GACCGTGGCCTGGAAGGCCGATAGCTCTCCTGTGAAGGCCGGCGTGGAAACCACC |
| | ACCCCTAGCAAGCAGAGCAACAACAAATACGCCGCCAGCAGCTACCTGAGCCTGA |
| | CCCCCGAGCAGTGGAAGTCCCACAGATCCTACAGCTGCCAAGTGACCCACGAGGG |
| | CAGCACCGTGGAAAAGACAGTGGCCCCTACCGAGTGCAGC |
| 700 | GAAGTTCAGCTGCTGGAATCTGGCGGCGGACTGGTTCAACCTGGCGGATCTCTGAG |
| | ACTGAGCTGTGCCGCCAGCGGCTTCACCTTTAGCCACTATGGCATGCACTGGGTCC |
| | GACAGGCCCCTGGCAAAGGACTTGAATGGGTGTCCGGCATCAACTGGAATGGCGG |
| | CTCTACAGGCTACGCCGACTCTGTGAAGGGCAGATTCACCATCAGCCGGGACAAC |
| | AGCAAGAACACCCTGTACCTGCAGATGAACTCCCTGAGAGCCGAGGACACCGCCG |
| | TGTACTATTGTGCCAGAGGCCACCACAGCGGCTACGACGGCAGATTCTTTGACTAT |
| | TGGGGCCAGGGCACCCTGGTCACAGTTTCTTCAGCCAGCACCAAGGGCCCCAGCGT |
| | GTTCCCTCTGGCCCCTAGCAGCAAGAGCACATCTGGCGGAACAGCCGCCCTGGGCT |
| | GCCTCGTGAAGGACTACTTTCCCGAGCCCGTGACCGTGTCCTGGAACTCTGGCGCT |
| | CTGACAAGCGGCGTGCACACCTTTCCAGCCGTGCTGCAGAGCAGCGGCCTGTACTC |
| | TCTGAGCAGCGTCGTGACAGTGCCCAGCAGCTCTCTGGGCACCCAGACCTACATCT |
| | GCAACGTGAACCACAAGCCCAGCAACACCAAGGTGGACAAGAAGGTGGAACCCA |
| | AGAGCTGCGACAAGACCCACACCTGTCCCCCTTGTCCTGCCCCCGAACTGCTGGGA |
| | GGCCCTTCCGTGTTCCTGTTCCCCCCAAAGCCCAAGGACACCCTGATGATCAGCCG |
| | GACCCCCGAAGTGACCTGCGTGGTGGTGGATGTGTCCCACGAGGACCCTGAAGTG |
| | AAGTTCAATTGGTACGTGGACGGCGTGGAAGTGCACAACGCCAAGACCAAGCCTA |
| | GAGAGGAACAGTACAACAGCACCTACCGGGTGGTGTCCGTGCTGACAGTGCTGCA |
| | CCAGGACTGGCTGAACGGCAAAGAGTACAAGTGCAAGGTGTCCAACAAGGCCCTG |
| | CCTGCCCCCATCGAGAAAACCATCAGCAAGGCCAAGGGCCAGCCCCGCGAACCCC |
| | AGGTGTACACACTGCCCCCAAGCAGGGACGAGCTGACCAAGAACCAGGTGTCCCT |
| | GACCTGTCTCGTGAAAGGCTTCTACCCCTCCGATATCGCCGTGGAATGGGAGAGCA |
| | ACGGCCAGCCCGAGAACAACTACAAGACCACCCCCCCTGTGCTGGACAGCGACGG |
| | CTCATTCTTCCTGTACAGCAAGCTGACCGTGGACAAGTCCCGGTGGCAGCAGGGCA |
| | ACGTGTTCAGCTGCAGCGTGATGCACGAGGCCCTGCACAACCACTACACCCAGAA |
| | GTCCCTGAGCCTGAGCCCTGGC |
| 701 | CATCAGCTGTACAGGCAGCAGCTCCAATATCGGAGCCGGCTACAACGTGCACTGG |
| | CAGTCTGTTCTGACACAGCCTCCTAGCGCCTCTGGCACACCTGGACAGAGAGTGAC |
| | CATCAGCTGTACCGGCAGCAGCTCCAATATCGGAGCCGGCTACAACGTGCACTGGT |
| | ATCAGCAGCTGCCTGGCACAGCCCCTAAACTGCTGATCTACACCAACAACAGACG |
| | GCCCAGCGGCGTGCCCGATAGATTTTCTGGCAGCAAGAGCGGCACAAGCGCCAGC |
| | CTGGCTATCTCTGGACTGAGATCTGAGGACGAGGCCGACTACTATTGCGCCGCCTG |
| | GGATGCTTCTCTGAGCGGATGGGTTTTCGGCGGAGGCACCAAACTGACAGTGCTAG |
| | GCCAGCCTAAAGCCGCCCCTAGCGTGACCCTGTTCCCTCCAAGCAGCGAGGAACTG |
| | CAGGCCAACAAGGCCACCCTCGTGTGCCTGATCAGCGACTTCTATCCTGGCGCCGT |
| | GACCGTGGCCTGGAAGGCCGATAGCTCTCCTGTGAAGGCCGGCGTGGAAACCACC |
| | ACCCCTAGCAAGCAGAGCAACAACAAATACGCCGCCAGCAGCTACCTGAGCCTGA |
| | CCCCCGAGCAGTGGAAGTCCCACAGATCCTACAGCTGCCAAGTGACCCACGAGGG |
| | CAGCACCGTGGAAAAGACAGTGGCCCCTACCGAGTGCAGC |
| 702 | EVQLLESGGGLVQPGGSLRLSCAASGFTFSHYGMHWVRQAPGKGLEWVSGINWNGG |
| | STGYADSVKGRFTISRDNSKNTLYLQMNSLRAEDTAVYYCARGHHSGYDGRFFDYW |
| | GQGTLVTVSS |
| 703 | HYGMH |
| 704 | GINWNGGSTGYADSVKG |
| 705 | GHHSGYDGRFFDY |
| 706 | QSVLTQPPSVSGTPGQRVTISCTGSSSNIGAGYNVHWYQQLPGTAPKLLIYTNNRRPSG |
| | VPDRFSGSKSGTSASLAISGLRSEDEADYYCAAWDASLSGWVFGGGTKLTVL |
| 707 | TGSSSNIGAGYNVH |
| 708 | TNNRRPS |
| 709 | AAWDASLSGWV |
| 710 | GAAGTTCAGCTGCTGGAATCTGGCGGCGGACTGGTTCAACCTGGCGGATCTCTGAG |
| | ACTGAGCTGTGCCGCCAGCGGCTTCACCTTTAGCCACTATGGCATGCACTGGGTCC |
| | GACAGGCCCCTGGCAAAGGACTTGAATGGGTGTCCGGCATCAACTGGAATGGCGG |
| | CTCTACAGGCTACGCCGACTCTGTGAAGGGCAGATTCACCATCAGCCGGGACAAC |
| | AGCAAGAACACCCTGTACCTGCAGATGAACTCCCTGAGAGCCGAGGACACCGCCG |
| | TGTACTATTGTGCCAGAGGCCACCACAGCGGCTACGACGGCAGATTCTTTGACTAT |
| | TGGGGCCAGGGCACCCTGGTCACAGTTTCTTCA |
| 711 | CACTATGGCATGCAC |
| 712 | GGCATCAACTGGAATGGCGGCTCTACAGGCTACGCCGACTCTGTGAAGGGC |
| 713 | GGCCACCACAGCGGCTACGACGGCAGATTCTTTGACTAT |
| 714 | CAGTCTGTTCTGACACAGCCTCCATCCGTGTCTGGCACACCTGGCCAGAGAGTGAC |
| | CATCAGCTGTACCGGCAGCAGCTCCAATATCGGAGCCGGCTACAACGTGCACTGGT |
| | ATCAGCAGCTGCCTGGCACAGCCCCTAAACTGCTGATCTACACCAACAACAGACG |
| | GCCCAGCGGCGTGCCCGATAGATTTTCTGGCTCTAAGAGCGGCACCAGCGCCAGCC |
| | TGGCTATCTCTGGACTGAGATCTGAGGACGAGGCCGACTACTATTGCGCCGCCTGG |
| | GATGCTTCTCTGAGCGGATGGGTTTTCGGCGGAGGCACCAAACTGACAGTGCTA |
| 715 | ACCGGCAGCAGCTCCAATATCGGAGCCGGCTACAACGTGCAC |
| 716 | ACCAACAACAGACGGCCCAGC |
| 717 | GCCGCCTGGGATGCTTCTCTGAGCGGATGGGTT |
| 718 | EVQLLESGGGLVQPGGSLRLSCAASGFTFSHYGMHWVRQAPGKGLEWVSGINWNGG |
| | STGYADSVKGRFTISRDNSKNTLYLQMNSLRAEDTAVYYCARGHHSGYDGRFFDYW |
| | GQGTLVTVSSASTKGPSVFPLAPSSKSTSGGTAALGCLVKDYFPEPVTVSWNSGALTSG |
| | VHTFPAVLQSSGLYSLSSVVTVPSSSLGTQTYICNVNHKPSNTKVDKKVEPKSCDKTHT |
| | CPPCPAPELLGGPSVFLFPPKPKDTLMISRTPEVTCVVVDVSHEDPEVKFNWYVDGVE |
| | VHNAKTKPREEQYNSTYRVVSVLTVLHQDWLNGKEYKCKVSNKALPAPIEKTISKAK |
| | GQPREPQVYTLPPSRDELTKNQVSLTCLVKGFYPSDIAVEWESNGQPENNYKTTPPVL |
| | DSDGSFFLYSKLTVDKSRWQQGNVFSCSVMHEALHNHYTQKSLSLSPG |
| 719 | QSVLTQPPSVSGTPGQRVTISCTGSSSNIGAGYNVHWYQQLPGTAPKLLIYTNNRRPSG |
| | VPDRFSGSKSGTSASLAISGLRSEDEADYYCAAWDASLSGWVFGGGTKLTVLGQPKA |
| | APSVTLFPPSSEELQANKATLVCLISDFYPGAVTVAWKADSSPVKAGVETTTPSKQSNN |
| | KYAASSYLSLTPEQWKSHRSYSCQVTHEGSTVEKTVAPTECS |
| 720 | GAAGTTCAGCTGCTGGAATCTGGCGGCGGACTGGTTCAACCTGGCGGATCTCTGAG |
| | ACTGAGCTGTGCCGCCAGCGGCTTCACCTTTAGCCACTATGGCATGCACTGGGTCC |
| | GACAGGCCCCTGGCAAAGGACTTGAATGGGTGTCCGGCATCAACTGGAATGGCGG |
| | CTCTACAGGCTACGCCGACTCTGTGAAGGGCAGATTCACCATCAGCCGGGACAAC |
| | AGCAAGAACACCCTGTACCTGCAGATGAACTCCCTGAGAGCCGAGGACACCGCCG |
| | TGTACTATTGTGCCAGAGGCCACCACAGCGGCTACGACGGCAGATTCTTTGACTAT |
| | TGGGGCCAGGGCACCCTGGTCACAGTTTCTTCAGCCAGCACCAAGGGCCCCAGCGT |
| | GTTCCCTCTGGCCCCTAGCAGCAAGAGCACATCTGGCGGAACAGCCGCCCTGGGCT |
| | GCCTCGTGAAGGACTACTTTCCCGAGCCCGTGACCGTGTCCTGGAACTCTGGCGCT |
| | CTGACAAGCGGCGTGCACACCTTTCCAGCCGTGCTGCAGAGCAGCGGCCTGTACTC |
| | TCTGAGCAGCGTCGTGACAGTGCCCAGCAGCTCTCTGGGCACCCAGACCTACATCT |
| | GCAACGTGAACCACAAGCCCAGCAACACCAAGGTGGACAAGAAGGTGGAACCCA |
| | AGAGCTGCGACAAGACCCACACCTGTCCCCCTTGTCCTGCCCCCGAACTGCTGGGA |
| | GGCCCTTCCGTGTTCCTGTTCCCCCCAAAGCCCAAGGACACCCTGATGATCAGCCG |
| | GACCCCCGAAGTGACCTGCGTGGTGGTGGATGTGTCCCACGAGGACCCTGAAGTG |
| | AAGTTCAATTGGTACGTGGACGGCGTGGAAGTGCACAACGCCAAGACCAAGCCTA |
| | GAGAGGAACAGTACAACAGCACCTACCGGGTGGTGTCCGTGCTGACAGTGCTGCA |
| | CCAGGACTGGCTGAACGGCAAAGAGTACAAGTGCAAGGTGTCCAACAAGGCCCTG |
| | CCTGCCCCCATCGAGAAAACCATCAGCAAGGCCAAGGGCCAGCCCCGCGAACCCC |
| | AGGTGTACACACTGCCCCCAAGCAGGGACGAGCTGACCAAGAACCAGGTGTCCCT |
| | GACCTGTCTCGTGAAAGGCTTCTACCCCTCCGATATCGCCGTGGAATGGGAGAGCA |
| | ACGGCCAGCCCGAGAACAACTACAAGACCACCCCCCCTGTGCTGGACAGCGACGG |
| | CTCATTCTTCCTGTACAGCAAGCTGACCGTGGACAAGTCCCGGTGGCAGCAGGGCA |
| | ACGTGTTCAGCTGCAGCGTGATGCACGAGGCCCTGCACAACCACTACACCCAGAA |
| | GTCCCTGAGCCTGAGCCCTGGC |
| 721 | CAGTCTGTTCTGACACAGCCTCCATCCGTGTCTGGCACACCTGGCCAGAGAGTGAC |
| | CATCAGCTGTACCGGCAGCAGCTCCAATATCGGAGCCGGCTACAACGTGCACTGGT |
| | ATCAGCAGCTGCCTGGCACAGCCCCTAAACTGCTGATCTACACCAACAACAGACG |
| | GCCCAGCGGCGTGCCCGATAGATTTTCTGGCTCTAAGAGCGGCACCAGCGCCAGCC |
| | TGGCTATCTCTGGACTGAGATCTGAGGACGAGGCCGACTACTATTGCGCCGCCTGG |
| | GATGCTTCTCTGAGCGGATGGGTTTTCGGCGGAGGCACCAAACTGACAGTGCTAGG |
| | CCAGCCTAAAGCCGCCCCTAGCGTGACCCTGTTCCCTCCAAGCAGCGAGGAACTGC |
| | AGGCCAACAAGGCCACCCTCGTGTGCCTGATCAGCGACTTCTATCCTGGCGCCGTG |
| | ACCGTGGCCTGGAAGGCCGATAGCTCTCCTGTGAAGGCCGGCGTGGAAACCACCA |
| | CCCCTAGCAAGCAGAGCAACAACAAATACGCCGCCAGCAGCTACCTGAGCCTGAC |
| | CCCCGAGCAGTGGAAGTCCCACAGATCCTACAGCTGCCAAGTGACCCACGAGGGC |
| | AGCACCGTGGAAAAGACAGTGGCCCCTACCGAGTGCAGC |
| 722 | EVQLLESGGGLVQPGGSLRLSCAASGFTFSHYGMHWVRQAPGKGLEWVSGINWNGG |
| | STGYADSVKGRFTISRDNSKNTLYLQMNSLRAEDTAVYYCARGHHSGYDGRFFDYW |
| | GQGTLVTVSS |
| 723 | HYGMH |
| 724 | GINWNGGSTGYADSVKG |
| 725 | GHHSGYDGRFFDY |
| 726 | QSVLTQPPSASGAPGQRVTISCTGSSSNIGAGYNVHWYQQLPGTAPKLLIYTNNRRPSG |
| | VPDRFSGSKSGTSASLAISGLRSEDEADYYCAAWDASLSGWVFGGGTKLTVL |
| 727 | TGSSSNIGAGYNVH |
| 728 | TNNRRPS |
| 729 | AAWDASLSGWV |
| 730 | GAAGTTCAGCTGCTGGAATCTGGCGGCGGACTGGTTCAACCTGGCGGATCTCTGAG |
| | ACTGAGCTGTGCCGCCAGCGGCTTCACCTTTAGCCACTATGGCATGCACTGGGTCC |
| | GACAGGCCCCTGGCAAAGGACTTGAATGGGTGTCCGGCATCAACTGGAATGGCGG |
| | CTCTACAGGCTACGCCGACTCTGTGAAGGGCAGATTCACCATCAGCCGGGACAAC |
| | AGCAAGAACACCCTGTACCTGCAGATGAACTCCCTGAGAGCCGAGGACACCGCCG |
| | TGTACTATTGTGCCAGAGGCCACCACAGCGGCTACGACGGCAGATTCTTTGACTAT |
| | TGGGGCCAGGGCACCCTGGTCACAGTTTCTTCA |
| 731 | CACTATGGCATGCAC |
| 732 | GGCATCAACTGGAATGGCGGCTCTACAGGCTACGCCGACTCTGTGAAGGGC |
| 733 | GGCCACCACAGCGGCTACGACGGCAGATTCTTTGACTAT |
| 734 | CAGTCTGTTCTGACACAGCCTCCATCTGCTAGCGGAGCCCCTGGACAGAGAGTGAC |
| | CATCAGCTGTACAGGCAGCAGCTCCAATATCGGAGCCGGCTACAACGTGCACTGG |
| | TATCAGCAGCTGCCTGGCACAGCCCCTAAACTGCTGATCTACACCAACAACAGACG |
| | GCCCAGCGGCGTGCCCGATAGATTTTCTGGCAGCAAGAGCGGCACAAGCGCCAGC |
| | CTGGCTATCTCTGGACTGAGATCTGAGGACGAGGCCGACTACTATTGCGCCGCCTG |
| | GGATGCTTCTCTGAGCGGATGGGTTTTCGGCGGAGGCACCAAACTGACAGTGCTA |
| 735 | ACAGGCAGCAGCTCCAATATCGGAGCCGGCTACAACGTGCAC |
| 736 | ACCAACAACAGACGGCCCAGC |
| 737 | GCCGCCTGGGATGCTTCTCTGAGCGGATGGGTT |
| 738 | EVQLLESGGGLVQPGGSLRLSCAASGFTFSHYGMHWVRQAPGKGLEWVSGINWNGG |
| | STGYADSVKGRFTISRDNSKNTLYLQMNSLRAEDTAVYYCARGHHSGYDGRFFDYW |
| | GQGTLVTVSSASTKGPSVFPLAPSSKSTSGGTAALGCLVKDYFPEPVTVSWNSGALTSG |
| | VHTFPAVLQSSGLYSLSSVVTVPSSSLGTQTYICNVNHKPSNTKVDKKVEPKSCDKTHT |
| | CPPCPAPELLGGPSVFLFPPKPKDTLMISRTPEVTCVVVDVSHEDPEVKFNWYVDGVE |
| | VHNAKTKPREEQYNSTYRVVSVLTVLHQDWLNGKEYKCKVSNKALPAPIEKTISKAK |
| | GQPREPQVYTLPPSRDELTKNQVSLTCLVKGFYPSDIAVEWESNGQPENNYKTTPPVL |
| | DSDGSFFLYSKLTVDKSRWQQGNVFSCSVMHEALHNHYTQKSLSLSPG |
| 739 | QSVLTQPPSASGAPGQRVTISCTGSSSNIGAGYNVHWYQQLPGTAPKLLIYTNNRRPSG |
| | VPDRFSGSKSGTSASLAISGLRSEDEADYYCAAWDASLSGWVFGGGTKLTVLGQPKA |
| | APSVTLFPPSSEELQANKATLVCLISDFYPGAVTVAWKADSSPVKAGVETTTPSKQSNN |
| | KYAASSYLSLTPEQWKSHRSYSCQVTHEGSTVEKTVAPTECS |
| 740 | GAAGTTCAGCTGCTGGAATCTGGCGGCGGACTGGTTCAACCTGGCGGATCTCTGAG |
| | ACTGAGCTGTGCCGCCAGCGGCTTCACCTTTAGCCACTATGGCATGCACTGGGTCC |
| | GACAGGCCCCTGGCAAAGGACTTGAATGGGTGTCCGGCATCAACTGGAATGGCGG |
| | CTCTACAGGCTACGCCGACTCTGTGAAGGGCAGATTCACCATCAGCCGGGACAAC |
| | AGCAAGAACACCCTGTACCTGCAGATGAACTCCCTGAGAGCCGAGGACACCGCCG |
| | TGTACTATTGTGCCAGAGGCCACCACAGCGGCTACGACGGCAGATTCTTTGACTAT |
| | TGGGGCCAGGGCACCCTGGTCACAGTTTCTTCAGCCAGCACCAAGGGCCCCAGCGT |
| | GTTCCCTCTGGCCCCTAGCAGCAAGAGCACATCTGGCGGAACAGCCGCCCTGGGCT |
| | GCCTCGTGAAGGACTACTTTCCCGAGCCCGTGACCGTGTCCTGGAACTCTGGCGCT |
| | CTGACAAGCGGCGTGCACACCTTTCCAGCCGTGCTGCAGAGCAGCGGCCTGTACTC |
| | TCTGAGCAGCGTCGTGACAGTGCCCAGCAGCTCTCTGGGCACCCAGACCTACATCT |
| | GCAACGTGAACCACAAGCCCAGCAACACCAAGGTGGACAAGAAGGTGGAACCCA |
| | AGAGCTGCGACAAGACCCACACCTGTCCCCCTTGTCCTGCCCCCGAACTGCTGGGA |
| | GGCCCTTCCGTGTTCCTGTTCCCCCCAAAGCCCAAGGACACCCTGATGATCAGCCG |
| | GACCCCCGAAGTGACCTGCGTGGTGGTGGATGTGTCCCACGAGGACCCTGAAGTG |
| | AAGTTCAATTGGTACGTGGACGGCGTGGAAGTGCACAACGCCAAGACCAAGCCTA |
| | GAGAGGAACAGTACAACAGCACCTACCGGGTGGTGTCCGTGCTGACAGTGCTGCA |
| | CCAGGACTGGCTGAACGGCAAAGAGTACAAGTGCAAGGTGTCCAACAAGGCCCTG |
| | CCTGCCCCCATCGAGAAAACCATCAGCAAGGCCAAGGGCCAGCCCCGCGAACCCC |
| | AGGTGTACACACTGCCCCCAAGCAGGGACGAGCTGACCAAGAACCAGGTGTCCCT |
| | GACCTGTCTCGTGAAAGGCTTCTACCCCTCCGATATCGCCGTGGAATGGGAGAGCA |
| | ACGGCCAGCCCGAGAACAACTACAAGACCACCCCCCCTGTGCTGGACAGCGACGG |
| | CTCATTCTTCCTGTACAGCAAGCTGACCGTGGACAAGTCCCGGTGGCAGCAGGGCA |
| | ACGTGTTCAGCTGCAGCGTGATGCACGAGGCCCTGCACAACCACTACACCCAGAA |
| | GTCCCTGAGCCTGAGCCCTGGC |
| 741 | CAGTCTGTTCTGACACAGCCTCCATCTGCTAGCGGAGCCCCTGGACAGAGAGTGAC |
| | CATCAGCTGTACAGGCAGCAGCTCCAATATCGGAGCCGGCTACAACGTGCACTGG |
| | TATCAGCAGCTGCCTGGCACAGCCCCTAAACTGCTGATCTACACCAACAACAGACG |
| | GCCCAGCGGCGTGCCCGATAGATTTTCTGGCAGCAAGAGCGGCACAAGCGCCAGC |
| | CTGGCTATCTCTGGACTGAGATCTGAGGACGAGGCCGACTACTATTGCGCCGCCTG |
| | GGATGCTTCTCTGAGCGGATGGGTTTTCGGCGGAGGCACCAAACTGACAGTGCTAG |
| | GCCAGCCTAAAGCCGCCCCTAGCGTGACCCTGTTCCCTCCAAGCAGCGAGGAACTG |
| | CAGGCCAACAAGGCCACCCTCGTGTGCCTGATCAGCGACTTCTATCCTGGCGCCGT |
| | GACCGTGGCCTGGAAGGCCGATAGCTCTCCTGTGAAGGCCGGCGTGGAAACCACC |
| | ACCCCTAGCAAGCAGAGCAACAACAAATACGCCGCCAGCAGCTACCTGAGCCTGA |
| | CCCCCGAGCAGTGGAAGTCCCACAGATCCTACAGCTGCCAAGTGACCCACGAGGG |
| | CAGCACCGTGGAAAAGACAGTGGCCCCTACCGAGTGCAGC |
| 742 | EVQLLESGGGLVQPGGSLRLSCAASGFTFSHYGMHWVRQAPGKGLEWVSGINWNGG |
| | STGYADSVKGRFTISRDNSKNTLYLQMNSLRAEDTAVYYCARGHHSGYDGRFFDYW |
| | GQGTLVTVSS |
| 743 | HYGMH |
| 744 | GINWNGGSTGYADSVKG |
| 745 | GHHSGYDGRFFDY |
| 746 | QSVLTQPPSVSGAPGQRVTISCTGSSSNIGAGYNVHWYQQLPGTAPKLLIYTNNRRPSG |
| | VPDRFSGSKSGTSASLAISGLRSEDEADYYCAAWDASLSGWVFGGGTKLTVL |
| 747 | TGSSSNIGAGYNVH |
| 748 | TNNRRPS |
| 749 | AAWDASLSGWV |
| 750 | GAAGTTCAGCTGCTGGAATCTGGCGGCGGACTGGTTCAACCTGGCGGATCTCTGAG |
| | ACTGAGCTGTGCCGCCAGCGGCTTCACCTTTAGCCACTATGGCATGCACTGGGTCC |
| | GACAGGCCCCTGGCAAAGGACTTGAATGGGTGTCCGGCATCAACTGGAATGGCGG |
| | CTCTACAGGCTACGCCGACTCTGTGAAGGGCAGATTCACCATCAGCCGGGACAAC |
| | AGCAAGAACACCCTGTACCTGCAGATGAACTCCCTGAGAGCCGAGGACACCGCCG |
| | TGTACTATTGTGCCAGAGGCCACCACAGCGGCTACGACGGCAGATTCTTTGACTAT |
| | TGGGGCCAGGGCACCCTGGTCACAGTTTCTTCA |
| 751 | CACTATGGCATGCAC |
| 752 | GGCATCAACTGGAATGGCGGCTCTACAGGCTACGCCGACTCTGTGAAGGGC |
| 753 | GGCCACCACAGCGGCTACGACGGCAGATTCTTTGACTAT |
| 754 | CAGTCTGTTCTGACACAGCCTCCATCTGTGTCTGGCGCCCCTGGACAGAGAGTGAC |
| | CATCAGCTGTACAGGCAGCAGCTCCAATATCGGAGCCGGCTACAACGTGCACTGG |
| | TATCAGCAGCTGCCTGGCACAGCCCCTAAACTGCTGATCTACACCAACAACAGACG |
| | GCCCAGCGGCGTGCCCGATAGATTTTCTGGCAGCAAGAGCGGCACAAGCGCCAGC |
| | CTGGCTATCTCTGGACTGAGATCTGAGGACGAGGCCGACTACTATTGCGCCGCCTG |
| | GGATGCTTCTCTGAGCGGATGGGTTTTCGGCGGAGGCACCAAACTGACAGTGCTA |
| 755 | ACAGGCAGCAGCTCCAATATCGGAGCCGGCTACAACGTGCAC |
| 756 | ACCAACAACAGACGGCCCAGC |
| 757 | GCCGCCTGGGATGCTTCTCTGAGCGGATGGGTT |
| 758 | EVQLLESGGGLVQPGGSLRLSCAASGFTFSHYGMHWVRQAPGKGLEWVSGINWNGG |
| | STGYADSVKGRFTISRDNSKNTLYLQMNSLRAEDTAVYYCARGHHSGYDGRFFDYW |
| | GQGTLVTVSSASTKGPSVFPLAPSSKSTSGGTAALGCLVKDYFPEPVTVSWNSGALTSG |
| | VHTFPAVLQSSGLYSLSSVVTVPSSSLGTQTYICNVNHKPSNTKVDKKVEPKSCDKTHT |
| | CPPCPAPELLGGPSVFLFPPKPKDTLMISRTPEVTCVVVDVSHEDPEVKFNWYVDGVE |
| | VHNAKTKPREEQYNSTYRVVSVLTVLHQDWLNGKEYKCKVSNKALPAPIEKTISKAK |
| | GQPREPQVYTLPPSRDELTKNQVSLTCLVKGFYPSDIAVEWESNGQPENNYKTTPPVL |
| | DSDGSFFLYSKLTVDKSRWQQGNVFSCSVMHEALHNHYTQKSLSLSPG |
| 759 | QSVLTQPPSVSGAPGQRVTISCTGSSSNIGAGYNVHWYQQLPGTAPKLLIYTNNRRPSG |
| | VPDRFSGSKSGTSASLAISGLRSEDEADYYCAAWDASLSGWVFGGGTKLTVLGQPKA |
| | APSVTLFPPSSEELQANKATLVCLISDFYPGAVTVAWKADSSPVKAGVETTTPSKQSNN |
| | KYAASSYLSLTPEQWKSHRSYSCQVTHEGSTVEKTVAPTECS |
| 760 | GAAGTTCAGCTGCTGGAATCTGGCGGCGGACTGGTTCAACCTGGCGGATCTCTGAG |
| | ACTGAGCTGTGCCGCCAGCGGCTTCACCTTTAGCCACTATGGCATGCACTGGGTCC |
| | GACAGGCCCCTGGCAAAGGACTTGAATGGGTGTCCGGCATCAACTGGAATGGCGG |
| | CTCTACAGGCTACGCCGACTCTGTGAAGGGCAGATTCACCATCAGCCGGGACAAC |
| | AGCAAGAACACCCTGTACCTGCAGATGAACTCCCTGAGAGCCGAGGACACCGCCG |
| | TGTACTATTGTGCCAGAGGCCACCACAGCGGCTACGACGGCAGATTCTTTGACTAT |
| | TGGGGCCAGGGCACCCTGGTCACAGTTTCTTCAGCCAGCACCAAGGGCCCCAGCGT |
| | GTTCCCTCTGGCCCCTAGCAGCAAGAGCACATCTGGCGGAACAGCCGCCCTGGGCT |
| | GCCTCGTGAAGGACTACTTTCCCGAGCCCGTGACCGTGTCCTGGAACTCTGGCGCT |
| | CTGACAAGCGGCGTGCACACCTTTCCAGCCGTGCTGCAGAGCAGCGGCCTGTACTC |
| | TCTGAGCAGCGTCGTGACAGTGCCCAGCAGCTCTCTGGGCACCCAGACCTACATCT |
| | GCAACGTGAACCACAAGCCCAGCAACACCAAGGTGGACAAGAAGGTGGAACCCA |
| | AGAGCTGCGACAAGACCCACACCTGTCCCCCTTGTCCTGCCCCCGAACTGCTGGGA |
| | GGCCCTTCCGTGTTCCTGTTCCCCCCAAAGCCCAAGGACACCCTGATGATCAGCCG |
| | GACCCCCGAAGTGACCTGCGTGGTGGTGGATGTGTCCCACGAGGACCCTGAAGTG |
| | AAGTTCAATTGGTACGTGGACGGCGTGGAAGTGCACAACGCCAAGACCAAGCCTA |
| | GAGAGGAACAGTACAACAGCACCTACCGGGTGGTGTCCGTGCTGACAGTGCTGCA |
| | CCAGGACTGGCTGAACGGCAAAGAGTACAAGTGCAAGGTGTCCAACAAGGCCCTG |
| | CCTGCCCCCATCGAGAAAACCATCAGCAAGGCCAAGGGCCAGCCCCGCGAACCCC |
| | AGGTGTACACACTGCCCCCAAGCAGGGACGAGCTGACCAAGAACCAGGTGTCCCT |
| | GACCTGTCTCGTGAAAGGCTTCTACCCCTCCGATATCGCCGTGGAATGGGAGAGCA |
| | ACGGCCAGCCCGAGAACAACTACAAGACCACCCCCCCTGTGCTGGACAGCGACGG |
| | CTCATTCTTCCTGTACAGCAAGCTGACCGTGGACAAGTCCCGGTGGCAGCAGGGCA |
| | ACGTGTTCAGCTGCAGCGTGATGCACGAGGCCCTGCACAACCACTACACCCAGAA |
| | GTCCCTGAGCCTGAGCCCTGGC |
| 761 | CAGTCTGTTCTGACACAGCCTCCATCTGTGTCTGGCGCCCCTGGACAGAGAGTGAC |
| | CATCAGCTGTACAGGCAGCAGCTCCAATATCGGAGCCGGCTACAACGTGCACTGG |
| | TATCAGCAGCTGCCTGGCACAGCCCCTAAACTGCTGATCTACACCAACAACAGACG |
| | GCCCAGCGGCGTGCCCGATAGATTTTCTGGCAGCAAGAGCGGCACAAGCGCCAGC |
| | CTGGCTATCTCTGGACTGAGATCTGAGGACGAGGCCGACTACTATTGCGCCGCCTG |
| | GGATGCTTCTCTGAGCGGATGGGTTTTCGGCGGAGGCACCAAACTGACAGTGCTAG |
| | GCCAGCCTAAAGCCGCCCCTAGCGTGACCCTGTTCCCTCCAAGCAGCGAGGAACTG |
| | CAGGCCAACAAGGCCACCCTCGTGTGCCTGATCAGCGACTTCTATCCTGGCGCCGT |
| | GACCGTGGCCTGGAAGGCCGATAGCTCTCCTGTGAAGGCCGGCGTGGAAACCACC |
| | ACCCCTAGCAAGCAGAGCAACAACAAATACGCCGCCAGCAGCTACCTGAGCCTGA |
| | CCCCCGAGCAGTGGAAGTCCCACAGATCCTACAGCTGCCAAGTGACCCACGAGGG |
| | CAGCACCGTGGAAAAGACAGTGGCCCCTACCGAGTGCAGC |
| 762 | EVQLLESGGGLVQPGGSLRLSCAASGFTFSSYGMHWVRQAPGKGLEWVSGINWNGGS |
| | TGYADSVKGRFTISRDNSKNTLYLQMNSLRAEDTAVYYCARGHHSGYDGRFFDYWG |
| | QGTLVTVSS |
| 763 | SYGMH |
| 764 | GINWNGGSTGYADSVKG |
| 765 | GHHSGYDGRFFDY |
| 766 | QSVLTQPPSASGTPGQRVTISCTGSSSNIGAGYNVHWYQQLPGTAPKLLIYTNNRRPSG |
| | VPDRFSGSKSGTSASLAISGLRSEDEADYYCAAWDASLSGWVFGGGTKLTVL |
| 767 | TGSSSNIGAGYNVH |
| 768 | TNNRRPS |
| 769 | AAWDASLSGWV |
| 770 | GAAGTTCAGCTGCTGGAATCTGGCGGCGGACTGGTTCAACCTGGCGGATCTCTGAG |
| | ACTGAGCTGTGCCGCCAGCGGCTTCACCTTTAGCAGCTATGGCATGCACTGGGTCC |
| | GACAGGCCCCTGGCAAAGGACTTGAATGGGTGTCCGGCATCAACTGGAATGGCGG |
| | CTCTACAGGCTACGCCGACTCTGTGAAGGGCAGATTCACCATCAGCCGGGACAAC |
| | AGCAAGAACACCCTGTACCTGCAGATGAACTCCCTGAGAGCCGAGGACACCGCCG |
| | TGTACTATTGTGCCAGAGGCCACCACAGCGGCTACGACGGCAGATTCTTTGACTAT |
| | TGGGGCCAGGGCACCCTGGTCACAGTTTCTTCA |
| 771 | AGCTATGGCATGCAC |
| 772 | GGCATCAACTGGAATGGCGGCTCTACAGGCTACGCCGACTCTGTGAAGGGC |
| 773 | GGCCACCACAGCGGCTACGACGGCAGATTCTTTGACTAT |
| 774 | CAGTCTGTTCTGACACAGCCTCCTAGCGCCTCTGGCACACCTGGACAGAGAGTGAC |
| | CATCAGCTGTACCGGCAGCAGCTCCAATATCGGAGCCGGCTACAACGTGCACTGGT |
| | ATCAGCAGCTGCCTGGCACAGCCCCTAAACTGCTGATCTACACCAACAACAGACG |
| | GCCCAGCGGCGTGCCCGATAGATTTTCTGGCAGCAAGAGCGGCACAAGCGCCAGC |
| | CTGGCTATCTCTGGACTGAGATCTGAGGACGAGGCCGACTACTATTGCGCCGCCTG |
| | GGATGCTTCTCTGAGCGGATGGGTTTTCGGCGGAGGCACCAAACTGACAGTGCTA |
| 775 | ACCGGCAGCAGCTCCAATATCGGAGCCGGCTACAACGTGCAC |
| 776 | ACCAACAACAGACGGCCCAGC |
| 777 | GCCGCCTGGGATGCTTCTCTGAGCGGATGGGTT |
| 778 | EVQLLESGGGLVQPGGSLRLSCAASGFTFSSYGMHWVRQAPGKGLEWVSGINWNGGS |
| | TGYADSVKGRFTISRDNSKNTLYLQMNSLRAEDTAVYYCARGHHSGYDGRFFDYWG |
| | QGTLVTVSSASTKGPSVFPLAPSSKSTSGGTAALGCLVKDYFPEPVTVSWNSGALTSGV |
| | HTFPAVLQSSGLYSLSSVVTVPSSSLGTQTYICNVNHKPSNTKVDKKVEPKSCDKTHTC |
| | PPCPAPELLGGPSVFLFPPKPKDTLMISRTPEVTCVVVDVSHEDPEVKFNWYVDGVEV |
| | HNAKTKPREEQYNSTYRVVSVLTVLHQDWLNGKEYKCKVSNKALPAPIEKTISKAKG |
| | QPREPQVYTLPPSRDELTKNQVSLTCLVKGFYPSDIAVEWESNGQPENNYKTTPPVLDS |
| | DGSFFLYSKLTVDKSRWQQGNVFSCSVMHEALHNHYTQKSLSLSPG |
| 779 | QSVLTQPPSASGTPGQRVTISCTGSSSNIGAGYNVHWYQQLPGTAPKLLIYTNNRRPSG |
| | APSVTLFPPSSEELQANKATLVCLISDFYPGAVTVAWKADSSPVKAGVETTTPSKQSNN |
| | KYAASSYLSLTPEQWKSHRSYSCQVTHEGSTVEKTVAPTECS |
| 780 | GAAGTTCAGCTGCTGGAATCTGGCGGCGGACTGGTTCAACCTGGCGGATCTCTGAG |
| | ACTGAGCTGTGCCGCCAGCGGCTTCACCTTTAGCAGCTATGGCATGCACTGGGTCC |
| | GACAGGCCCCTGGCAAAGGACTTGAATGGGTGTCCGGCATCAACTGGAATGGCGG |
| | CTCTACAGGCTACGCCGACTCTGTGAAGGGCAGATTCACCATCAGCCGGGACAAC |
| | AGCAAGAACACCCTGTACCTGCAGATGAACTCCCTGAGAGCCGAGGACACCGCCG |
| | TGTACTATTGTGCCAGAGGCCACCACAGCGGCTACGACGGCAGATTCTTTGACTAT |
| | TGGGGCCAGGGCACCCTGGTCACAGTTTCTTCAGCCAGCACCAAGGGCCCCAGCGT |
| | GTTCCCTCTGGCCCCTAGCAGCAAGAGCACATCTGGCGGAACAGCCGCCCTGGGCT |
| | GCCTCGTGAAGGACTACTTTCCCGAGCCCGTGACCGTGTCCTGGAACTCTGGCGCT |
| | CTGACAAGCGGCGTGCACACCTTTCCAGCCGTGCTGCAGAGCAGCGGCCTGTACTC |
| | TCTGAGCAGCGTCGTGACAGTGCCCAGCAGCTCTCTGGGCACCCAGACCTACATCT |
| | GCAACGTGAACCACAAGCCCAGCAACACCAAGGTGGACAAGAAGGTGGAACCCA |
| | AGAGCTGCGACAAGACCCACACCTGTCCCCCTTGTCCTGCCCCCGAACTGCTGGGA |
| | GGCCCTTCCGTGTTCCTGTTCCCCCCAAAGCCCAAGGACACCCTGATGATCAGCCG |
| | GACCCCCGAAGTGACCTGCGTGGTGGTGGATGTGTCCCACGAGGACCCTGAAGTG |
| | AAGTTCAATTGGTACGTGGACGGCGTGGAAGTGCACAACGCCAAGACCAAGCCTA |
| | GAGAGGAACAGTACAACAGCACCTACCGGGTGGTGTCCGTGCTGACAGTGCTGCA |
| | CCAGGACTGGCTGAACGGCAAAGAGTACAAGTGCAAGGTGTCCAACAAGGCCCTG |
| | CCTGCCCCCATCGAGAAAACCATCAGCAAGGCCAAGGGCCAGCCCCGCGAACCCC |
| | AGGTGTACACACTGCCCCCAAGCAGGGACGAGCTGACCAAGAACCAGGTGTCCCT |
| | GACCTGTCTCGTGAAAGGCTTCTACCCCTCCGATATCGCCGTGGAATGGGAGAGCA |
| | ACGGCCAGCCCGAGAACAACTACAAGACCACCCCCCCTGTGCTGGACAGCGACGG |
| | CTCATTCTTCCTGTACAGCAAGCTGACCGTGGACAAGTCCCGGTGGCAGCAGGGCA |
| | ACGTGTTCAGCTGCAGCGTGATGCACGAGGCCCTGCACAACCACTACACCCAGAA |
| | GTCCCTGAGCCTGAGCCCTGGC |
| 781 | VPDRFSGSKSGTSASLAISGLRSEDEADYYCAAWDASLSGWVFGGGTKLTVLGQPKA |
| | CAGTCTGTTCTGACACAGCCTCCTAGCGCCTCTGGCACACCTGGACAGAGAGTGAC |
| | CATCAGCTGTACCGGCAGCAGCTCCAATATCGGAGCCGGCTACAACGTGCACTGGT |
| | ATCAGCAGCTGCCTGGCACAGCCCCTAAACTGCTGATCTACACCAACAACAGACG |
| | GCCCAGCGGCGTGCCCGATAGATTTTCTGGCAGCAAGAGCGGCACAAGCGCCAGC |
| | CTGGCTATCTCTGGACTGAGATCTGAGGACGAGGCCGACTACTATTGCGCCGCCTG |
| | GGATGCTTCTCTGAGCGGATGGGTTTTCGGCGGAGGCACCAAACTGACAGTGCTAG |
| | GCCAGCCTAAAGCCGCCCCTAGCGTGACCCTGTTCCCTCCAAGCAGCGAGGAACTG |
| | CAGGCCAACAAGGCCACCCTCGTGTGCCTGATCAGCGACTTCTATCCTGGCGCCGT |
| | GACCGTGGCCTGGAAGGCCGATAGCTCTCCTGTGAAGGCCGGCGTGGAAACCACC |
| | ACCCCTAGCAAGCAGAGCAACAACAAATACGCCGCCAGCAGCTACCTGAGCCTGA |
| | CCCCCGAGCAGTGGAAGTCCCACAGATCCTACAGCTGCCAAGTGACCCACGAGGG |
| | CAGCACCGTGGAAAAGACAGTGGCCCCTACCGAGTGCAGC |
| 782 | EVQLLESGGGLVQPGGSLRLSCAASGFTFSHYGMHWVRQAPGKGLEWVSAINWNGG |
| | STGYADSVKGRFTISRDNSKNTLYLQMNSLRAEDTAVYYCARGHHSGYDGRFFDYW |
| | GQGTLVTVSS |
| 783 | HYGMH |
| 784 | AINWNGGSTGYADSVKG |
| 785 | GHHSGYDGRFFDY |
| 786 | QSVLTQPPSASGTPGQRVTISCTGSSSNIGAGYNVHWYQQLPGTAPKLLIYTNNRRPSG |
| | VPDRFSGSKSGTSASLAISGLRSEDEADYYCAAWDASLSGWVFGGGTKLTVL |
| 787 | TGSSSNIGAGYNVH |
| 788 | TNNRRPS |
| 789 | AAWDASLSGWV |
| 790 | GAAGTTCAGCTGCTGGAATCTGGCGGCGGACTGGTTCAACCTGGCGGATCTCTGAG |
| | ACTGAGCTGTGCCGCCAGCGGCTTCACCTTTAGCCACTATGGCATGCACTGGGTCC |
| | GACAGGCCCCTGGCAAAGGACTTGAATGGGTGTCCGCCATCAACTGGAATGGCGG |
| | CTCTACAGGCTACGCCGACTCTGTGAAGGGCAGATTCACCATCAGCCGGGACAAC |
| | AGCAAGAACACCCTGTACCTGCAGATGAACTCCCTGAGAGCCGAGGACACCGCCG |
| | TGTACTATTGTGCCAGAGGCCACCACAGCGGCTACGACGGCAGATTCTTTGACTAT |
| | TGGGGCCAGGGCACCCTGGTCACAGTTTCTTCA |
| 791 | CACTATGGCATGCAC |
| 792 | GCCATCAACTGGAATGGCGGCTCTACAGGCTACGCCGACTCTGTGAAGGGC |
| 793 | GGCCACCACAGCGGCTACGACGGCAGATTCTTTGACTAT |
| 794 | CAGTCTGTTCTGACACAGCCTCCTAGCGCCTCTGGCACACCTGGACAGAGAGTGAC |
| | CATCAGCTGTACCGGCAGCAGCTCCAATATCGGAGCCGGCTACAACGTGCACTGGT |
| | ATCAGCAGCTGCCTGGCACAGCCCCTAAACTGCTGATCTACACCAACAACAGACG |
| | GCCCAGCGGCGTGCCCGATAGATTTTCTGGCAGCAAGAGCGGCACAAGCGCCAGC |
| | CTGGCTATCTCTGGACTGAGATCTGAGGACGAGGCCGACTACTATTGCGCCGCCTG |
| | GGATGCTTCTCTGAGCGGATGGGTTTTCGGCGGAGGCACCAAACTGACAGTGCTA |
| 795 | ACCGGCAGCAGCTCCAATATCGGAGCCGGCTACAACGTGCAC |
| 796 | ACCAACAACAGACGGCCCAGC |
| 797 | GCCGCCTGGGATGCTTCTCTGAGCGGATGGGTT |
| 798 | EVQLLESGGGLVQPGGSLRLSCAASGFTFSHYGMHWVRQAPGKGLEWVSAINWNGG |
| | STGYADSVKGRFTISRDNSKNTLYLQMNSLRAEDTAVYYCARGHHSGYDGRFFDYW |
| | GQGTLVTVSSASTKGPSVFPLAPSSKSTSGGTAALGCLVKDYFPEPVTVSWNSGALTSG |
| | VHTFPAVLQSSGLYSLSSVVTVPSSSLGTQTYICNVNHKPSNTKVDKKVEPKSCDKTHT |
| | CPPCPAPELLGGPSVFLFPPKPKDTLMISRTPEVTCVVVDVSHEDPEVKFNWYVDGVE |
| | VHNAKTKPREEQYNSTYRVVSVLTVLHQDWLNGKEYKCKVSNKALPAPIEKTISKAK |
| | GQPREPQVYTLPPSRDELTKNQVSLTCLVKGFYPSDIAVEWESNGQPENNYKTTPPVL |
| | DSDGSFFLYSKLTVDKSRWQQGNVFSCSVMHEALHNHYTQKSLSLSPG |
| 799 | QSVLTQPPSASGTPGQRVTISCTGSSSNIGAGYNVHWYQQLPGTAPKLLIYTNNRRPSG |
| | VPDRFSGSKSGTSASLAISGLRSEDEADYYCAAWDASLSGWVFGGGTKLTVLGQPKA |
| | APSVTLFPPSSEELQANKATLVCLISDFYPGAVTVAWKADSSPVKAGVETTTPSKQSNN |
| | KYAASSYLSLTPEQWKSHRSYSCQVTHEGSTVEKTVAPTECS |
| 800 | GAAGTTCAGCTGCTGGAATCTGGCGGCGGACTGGTTCAACCTGGCGGATCTCTGAG |
| | ACTGAGCTGTGCCGCCAGCGGCTTCACCTTTAGCCACTATGGCATGCACTGGGTCC |
| | GACAGGCCCCTGGCAAAGGACTTGAATGGGTGTCCGCCATCAACTGGAATGGCGG |
| | CTCTACAGGCTACGCCGACTCTGTGAAGGGCAGATTCACCATCAGCCGGGACAAC |
| | AGCAAGAACACCCTGTACCTGCAGATGAACTCCCTGAGAGCCGAGGACACCGCCG |
| | TGTACTATTGTGCCAGAGGCCACCACAGCGGCTACGACGGCAGATTCTTTGACTAT |
| | TGGGGCCAGGGCACCCTGGTCACAGTTTCTTCAGCCAGCACCAAGGGCCCCAGCGT |
| | GTTCCCTCTGGCCCCTAGCAGCAAGAGCACATCTGGCGGAACAGCCGCCCTGGGCT |
| | GCCTCGTGAAGGACTACTTTCCCGAGCCCGTGACCGTGTCCTGGAACTCTGGCGCT |
| | CTGACAAGCGGCGTGCACACCTTTCCAGCCGTGCTGCAGAGCAGCGGCCTGTACTC |
| | TCTGAGCAGCGTCGTGACAGTGCCCAGCAGCTCTCTGGGCACCCAGACCTACATCT |
| | GCAACGTGAACCACAAGCCCAGCAACACCAAGGTGGACAAGAAGGTGGAACCCA |
| | AGAGCTGCGACAAGACCCACACCTGTCCCCCTTGTCCTGCCCCCGAACTGCTGGGA |
| | GGCCCTTCCGTGTTCCTGTTCCCCCCAAAGCCCAAGGACACCCTGATGATCAGCCG |
| | GACCCCCGAAGTGACCTGCGTGGTGGTGGATGTGTCCCACGAGGACCCTGAAGTG |
| | AAGTTCAATTGGTACGTGGACGGCGTGGAAGTGCACAACGCCAAGACCAAGCCTA |
| | GAGAGGAACAGTACAACAGCACCTACCGGGTGGTGTCCGTGCTGACAGTGCTGCA |
| | CCAGGACTGGCTGAACGGCAAAGAGTACAAGTGCAAGGTGTCCAACAAGGCCCTG |
| | CCTGCCCCCATCGAGAAAACCATCAGCAAGGCCAAGGGCCAGCCCCGCGAACCCC |
| | AGGTGTACACACTGCCCCCAAGCAGGGACGAGCTGACCAAGAACCAGGTGTCCCT |
| | GACCTGTCTCGTGAAAGGCTTCTACCCCTCCGATATCGCCGTGGAATGGGAGAGCA |
| | ACGGCCAGCCCGAGAACAACTACAAGACCACCCCCCCTGTGCTGGACAGCGACGG |
| | CTCATTCTTCCTGTACAGCAAGCTGACCGTGGACAAGTCCCGGTGGCAGCAGGGCA |
| | ACGTGTTCAGCTGCAGCGTGATGCACGAGGCCCTGCACAACCACTACACCCAGAA |
| | GTCCCTGAGCCTGAGCCCTGGC |
| 801 | CAGTCTGTTCTGACACAGCCTCCTAGCGCCTCTGGCACACCTGGACAGAGAGTGAC |
| | CATCAGCTGTACCGGCAGCAGCTCCAATATCGGAGCCGGCTACAACGTGCACTGGT |
| | ATCAGCAGCTGCCTGGCACAGCCCCTAAACTGCTGATCTACACCAACAACAGACG |
| | GCCCAGCGGCGTGCCCGATAGATTTTCTGGCAGCAAGAGCGGCACAAGCGCCAGC |
| | CTGGCTATCTCTGGACTGAGATCTGAGGACGAGGCCGACTACTATTGCGCCGCCTG |
| | GGATGCTTCTCTGAGCGGATGGGTTTTCGGCGGAGGCACCAAACTGACAGTGCTAG |
| | GCCAGCCTAAAGCCGCCCCTAGCGTGACCCTGTTCCCTCCAAGCAGCGAGGAACTG |
| | CAGGCCAACAAGGCCACCCTCGTGTGCCTGATCAGCGACTTCTATCCTGGCGCCGT |
| | GACCGTGGCCTGGAAGGCCGATAGCTCTCCTGTGAAGGCCGGCGTGGAAACCACC |
| | ACCCCTAGCAAGCAGAGCAACAACAAATACGCCGCCAGCAGCTACCTGAGCCTGA |
| | CCCCCGAGCAGTGGAAGTCCCACAGATCCTACAGCTGCCAAGTGACCCACGAGGG |
| | CAGCACCGTGGAAAAGACAGTGGCCCCTACCGAGTGCAGC |
| 802 | EVQLLESGGGLVQPGGSLRLSCAASGFTFSSYGMHWVRQAPGKGLEWVSAINWNGGS |
| | TGYADSVKGRFTISRDNSKNTLYLQMNSLRAEDTAVYYCARGHHSGYDGRFFDYWG |
| | QGTLVTVSS |
| 803 | SYGMH |
| 804 | AINWNGGSTGYADSVKG |
| 805 | GHHSGYDGRFFDY |
| 806 | QSVLTQPPSASGTPGQRVTISCTGSSSNIGAGYNVHWYQQLPGTAPKLLIYTNNRRPSG |
| | VPDRFSGSKSGTSASLAISGLRSEDEADYYCAAWDASLSGWVFGGGTKLTVL |
| 807 | TGSSSNIGAGYNVH |
| 808 | TNNRRPS |
| 809 | AAWDASLSGWV |
| 810 | GAAGTTCAGCTGCTGGAATCTGGCGGCGGACTGGTTCAACCTGGCGGATCTCTGAG |
| | ACTGAGCTGTGCCGCCAGCGGCTTCACCTTTAGCAGCTATGGCATGCACTGGGTCC |
| | GACAGGCCCCTGGCAAAGGACTTGAATGGGTGTCCGCCATCAACTGGAATGGCGG |
| | CTCTACAGGCTACGCCGACTCTGTGAAGGGCAGATTCACCATCAGCCGGGACAAC |
| | AGCAAGAACACCCTGTACCTGCAGATGAACTCCCTGAGAGCCGAGGACACCGCCG |
| | TGTACTATTGTGCCAGAGGCCACCACAGCGGCTACGACGGCAGATTCTTTGACTAT |
| | TGGGGCCAGGGCACCCTGGTCACAGTTTCTTCA |
| 811 | AGCTATGGCATGCAC |
| 812 | GCCATCAACTGGAATGGCGGCTCTACAGGCTACGCCGACTCTGTGAAGGGC |
| 813 | GGCCACCACAGCGGCTACGACGGCAGATTCTTTGACTAT |
| 814 | CAGTCTGTTCTGACACAGCCTCCTAGCGCCTCTGGCACACCTGGACAGAGAGTGAC |
| | CATCAGCTGTACCGGCAGCAGCTCCAATATCGGAGCCGGCTACAACGTGCACTGGT |
| | ATCAGCAGCTGCCTGGCACAGCCCCTAAACTGCTGATCTACACCAACAACAGACG |
| | GCCCAGCGGCGTGCCCGATAGATTTTCTGGCAGCAAGAGCGGCACAAGCGCCAGC |
| | CTGGCTATCTCTGGACTGAGATCTGAGGACGAGGCCGACTACTATTGCGCCGCCTG |
| | GGATGCTTCTCTGAGCGGATGGGTTTTCGGCGGAGGCACCAAACTGACAGTGCTA |
| 815 | ACCGGCAGCAGCTCCAATATCGGAGCCGGCTACAACGTGCAC |
| 816 | ACCAACAACAGACGGCCCAGC |
| 817 | GCCGCCTGGGATGCTTCTCTGAGCGGATGGGTT |
| 818 | EVQLLESGGGLVQPGGSLRLSCAASGFTFSSYGMHWVRQAPGKGLEWVSAINWNGGS |
| | TGYADSVKGRFTISRDNSKNTLYLQMNSLRAEDTAVYYCARGHHSGYDGRFFDYWG |
| | QGTLVTVSSASTKGPSVFPLAPSSKSTSGGTAALGCLVKDYFPEPVTVSWNSGALTSGV |
| | HTFPAVLQSSGLYSLSSVVTVPSSSLGTQTYICNVNHKPSNTKVDKKVEPKSCDKTHTC |
| | PPCPAPELLGGPSVFLFPPKPKDTLMISRTPEVTCVVVDVSHEDPEVKFNWYVDGVEV |
| | HNAKTKPREEQYNSTYRVVSVLTVLHQDWLNGKEYKCKVSNKALPAPIEKTISKAKG |
| | QPREPQVYTLPPSRDELTKNQVSLTCLVKGFYPSDIAVEWESNGQPENNYKTTPPVLDS |
| | DGSFFLYSKLTVDKSRWQQGNVFSCSVMHEALHNHYTQKSLSLSPG |
| 819 | QSVLTQPPSASGTPGQRVTISCTGSSSNIGAGYNVHWYQQLPGTAPKLLIYTNNRRPSG |
| | VPDRFSGSKSGTSASLAISGLRSEDEADYYCAAWDASLSGWVFGGGTKLTVLGQPKA |
| | APSVTLFPPSSEELQANKATLVCLISDFYPGAVTVAWKADSSPVKAGVETTTPSKQSNN |
| | KYAASSYLSLTPEQWKSHRSYSCQVTHEGSTVEKTVAPTECS |
| 820 | GAAGTTCAGCTGCTGGAATCTGGCGGCGGACTGGTTCAACCTGGCGGATCTCTGAG |
| | ACTGAGCTGTGCCGCCAGCGGCTTCACCTTTAGCAGCTATGGCATGCACTGGGTCC |
| | GACAGGCCCCTGGCAAAGGACTTGAATGGGTGTCCGCCATCAACTGGAATGGCGG |
| | CTCTACAGGCTACGCCGACTCTGTGAAGGGCAGATTCACCATCAGCCGGGACAAC |
| | AGCAAGAACACCCTGTACCTGCAGATGAACTCCCTGAGAGCCGAGGACACCGCCG |
| | TGTACTATTGTGCCAGAGGCCACCACAGCGGCTACGACGGCAGATTCTTTGACTAT |
| | TGGGGCCAGGGCACCCTGGTCACAGTTTCTTCAGCCAGCACCAAGGGCCCCAGCGT |
| | GTTCCCTCTGGCCCCTAGCAGCAAGAGCACATCTGGCGGAACAGCCGCCCTGGGCT |
| | GCCTCGTGAAGGACTACTTTCCCGAGCCCGTGACCGTGTCCTGGAACTCTGGCGCT |
| | CTGACAAGCGGCGTGCACACCTTTCCAGCCGTGCTGCAGAGCAGCGGCCTGTACTC |
| | TCTGAGCAGCGTCGTGACAGTGCCCAGCAGCTCTCTGGGCACCCAGACCTACATCT |
| | GCAACGTGAACCACAAGCCCAGCAACACCAAGGTGGACAAGAAGGTGGAACCCA |
| | AGAGCTGCGACAAGACCCACACCTGTCCCCCTTGTCCTGCCCCCGAACTGCTGGGA |
| | GGCCCTTCCGTGTTCCTGTTCCCCCCAAAGCCCAAGGACACCCTGATGATCAGCCG |
| | GACCCCCGAAGTGACCTGCGTGGTGGTGGATGTGTCCCACGAGGACCCTGAAGTG |
| | AAGTTCAATTGGTACGTGGACGGCGTGGAAGTGCACAACGCCAAGACCAAGCCTA |
| | GAGAGGAACAGTACAACAGCACCTACCGGGTGGTGTCCGTGCTGACAGTGCTGCA |
| | CCAGGACTGGCTGAACGGCAAAGAGTACAAGTGCAAGGTGTCCAACAAGGCCCTG |
| | CCTGCCCCCATCGAGAAAACCATCAGCAAGGCCAAGGGCCAGCCCCGCGAACCCC |
| | AGGTGTACACACTGCCCCCAAGCAGGGACGAGCTGACCAAGAACCAGGTGTCCCT |
| | GACCTGTCTCGTGAAAGGCTTCTACCCCTCCGATATCGCCGTGGAATGGGAGAGCA |
| | ACGGCCAGCCCGAGAACAACTACAAGACCACCCCCCCTGTGCTGGACAGCGACGG |
| | CTCATTCTTCCTGTACAGCAAGCTGACCGTGGACAAGTCCCGGTGGCAGCAGGGCA |
| | ACGTGTTCAGCTGCAGCGTGATGCACGAGGCCCTGCACAACCACTACACCCAGAA |
| | GTCCCTGAGCCTGAGCCCTGGC |
| 821 | CAGTCTGTTCTGACACAGCCTCCTAGCGCCTCTGGCACACCTGGACAGAGAGTGAC |
| | CATCAGCTGTACCGGCAGCAGCTCCAATATCGGAGCCGGCTACAACGTGCACTGGT |
| | ATCAGCAGCTGCCTGGCACAGCCCCTAAACTGCTGATCTACACCAACAACAGACG |
| | GCCCAGCGGCGTGCCCGATAGATTTTCTGGCAGCAAGAGCGGCACAAGCGCCAGC |
| | CTGGCTATCTCTGGACTGAGATCTGAGGACGAGGCCGACTACTATTGCGCCGCCTG |
| | GGATGCTTCTCTGAGCGGATGGGTTTTCGGCGGAGGCACCAAACTGACAGTGCTAG |
| | GCCAGCCTAAAGCCGCCCCTAGCGTGACCCTGTTCCCTCCAAGCAGCGAGGAACTG |
| | CAGGCCAACAAGGCCACCCTCGTGTGCCTGATCAGCGACTTCTATCCTGGCGCCGT |
| | GACCGTGGCCTGGAAGGCCGATAGCTCTCCTGTGAAGGCCGGCGTGGAAACCACC |
| | ACCCCTAGCAAGCAGAGCAACAACAAATACGCCGCCAGCAGCTACCTGAGCCTGA |
| | CCCCCGAGCAGTGGAAGTCCCACAGATCCTACAGCTGCCAAGTGACCCACGAGGG |
| | CAGCACCGTGGAAAAGACAGTGGCCCCTACCGAGTGCAGC |
| 822 | GAAGTTCAGCTGCTGGAATCTGGCGGCGGACTGGTTCAACCTGGCGGATCTCTGAG |
| | ACTGAGCTGTGCCGCCAGCGGCTTCACCTTTAGCAGCTATGGCATGCACTGGGTCC |
| | GACAGGCCCCTGGCAAAGGACTTGAATGGGTGTCCGCCATCAACTGGAATGGCGG |
| | CTCTACAGGCTACGCCGACTCTGTGAAGGGCAGATTCACCATCAGCCGGGACAAC |
| | AGCAAGAACACCCTGTACCTGCAGATGAACTCCCTGAGAGCCGAGGACACCGCCG |
| | TGTACTATTGTGCCAGAGGCCACCACAGCGGCTACGACGGCAGATTCTTTGACTAT |
| | TGGGGCCAGGGCACCCTGGTCACAGTTTCTTCAGCCAGCACCAAGGGCCCCAGCGT |
| | GTTCCCTCTGGCCCCTAGCAGCAAGAGCACATCTGGCGGAACAGCCGCCCTGGGCT |
| | GCCTCGTGAAGGACTACTTTCCCGAGCCCGTGACCGTGTCCTGGAACTCTGGCGCT |
| | CTGACAAGCGGCGTGCACACCTTTCCAGCCGTGCTGCAGAGCAGCGGCCTGTACTC |
| | TCTGAGCAGCGTCGTGACAGTGCCCAGCAGCTCTCTGGGCACCCAGACCTACATCT |
| | GCAACGTGAACCACAAGCCCAGCAACACCAAGGTGGACAAGAAGGTGGAACCCA |
| | AGAGCTGCGACAAGACCCACACCTGTCCCCCTTGTCCTGCCCCCGAACTGCTGGGA |
| | GGCCCTTCCGTGTTCCTGTTCCCCCCAAAGCCCAAGGACACCCTGATGATCAGCCG |
| | GACCCCCGAAGTGACCTGCGTGGTGGTGGATGTGTCCCACGAGGACCCTGAAGTG |
| | AAGTTCAATTGGTACGTGGACGGCGTGGAAGTGCACAACGCCAAGACCAAGCCTA |
| | GAGAGGAACAGTACAACAGCACCTACCGGGTGGTGTCCGTGCTGACAGTGCTGCA |
| | CCAGGACTGGCTGAACGGCAAAGAGTACAAGTGCAAGGTGTCCAACAAGGCCCTG |
| | CCTGCCCCCATCGAGAAAACCATCAGCAAGGCCAAGGGCCAGCCCCGCGAACCCC |
| | AGGTGTACACACTGCCCCCAAGCAGGGACGAGCTGACCAAGAACCAGGTGTCCCT |
| | GACCTGTCTCGTGAAAGGCTTCTACCCCTCCGATATCGCCGTGGAATGGGAGAGCA |
| | ACGGCCAGCCCGAGAACAACTACAAGACCACCCCCCCTGTGCTGGACAGCGACGG |
| | CTCATTCTTCCTGTACAGCAAGCTGACCGTGGACAAGTCCCGGTGGCAGCAGGGCA |
| | ACGTGTTCAGCTGCAGCGTGATGCACGAGGCCCTGCACAACCACTACACCCAGAA |
| | GTCCCTGAGCCTGAGCCCTGGC |
| 823 | CAGTCTGTTCTGACACAGCCTCCATCTGTGTCTGGCGCCCCTGGACAGAGAGTGAC |
| | CATCAGCTGTACAGGCAGCAGCTCCAATATCGGAGCCGGCTACAACGTGCACTGG |
| | TATCAGCAGCTGCCTGGCACAGCCCCTAAACTGCTGATCTACACCAACAACAGACG |
| | GCCCAGCGGCGTGCCCGATAGATTTTCTGGCAGCAAGAGCGGCACAAGCGCCAGC |
| | CTGGCTATCTCTGGACTGAGATCTGAGGACGAGGCCGACTACTATTGCGCCGCCTG |
| | GGATGCTTCTCTGAGCGGATGGGTTTTCGGCGGAGGCACCAAACTGACAGTGCTAG |
| | GCCAGCCTAAAGCCGCCCCTAGCGTGACCCTGTTCCCTCCAAGCAGCGAGGAACTG |
| | CAGGCCAACAAGGCCACCCTCGTGTGCCTGATCAGCGACTTCTATCCTGGCGCCGT |
| | GACCGTGGCCTGGAAGGCCGATAGCTCTCCTGTGAAGGCCGGCGTGGAAACCACC |
| | ACCCCTAGCAAGCAGAGCAACAACAAATACGCCGCCAGCAGCTACCTGAGCCTGA |
| | CCCCCGAGCAGTGGAAGTCCCACAGATCCTACAGCTGCCAAGTGACCCACGAGGG |
| | CAGCACCGTGGAAAAGACAGTGGCCCCTACCGAGTGCAGC |
| 824 | GAAGTTCAGCTGCTGGAATCTGGCGGCGGACTGGTTCAACCTGGCGGATCTCTGAG |
| | ACTGAGCTGTGCCGCCAGCGGCTTCACCTTTAGCAGCTATGGCATGCACTGGGTCC |
| | GACAGGCCCCTGGCAAAGGACTTGAATGGGTGTCCGCCATCAACTGGAATGGCGG |
| | CTCTACAGGCTACGCCGACTCTGTGAAGGGCAGATTCACCATCAGCCGGGACAAC |
| | AGCAAGAACACCCTGTACCTGCAGATGAACTCCCTGAGAGCCGAGGACACCGCCG |
| | TGTACTATTGTGCCAGAGGCCACCACAGCGGCTACGACGGCAGATTCTTTGACTAT |
| | TGGGGCCAGGGCACCCTGGTCACAGTTTCTTCAGCCAGCACCAAGGGCCCCAGCGT |
| | GTTCCCTCTGGCCCCTAGCAGCAAGAGCACATCTGGCGGAACAGCCGCCCTGGGCT |
| | GCCTCGTGAAGGACTACTTTCCCGAGCCCGTGACCGTGTCCTGGAACTCTGGCGCT |
| | CTGACAAGCGGCGTGCACACCTTTCCAGCCGTGCTGCAGAGCAGCGGCCTGTACTC |
| | TCTGAGCAGCGTCGTGACAGTGCCCAGCAGCTCTCTGGGCACCCAGACCTACATCT |
| | GCAACGTGAACCACAAGCCCAGCAACACCAAGGTGGACAAGAAGGTGGAACCCA |
| | AGAGCTGCGACAAGACCCACACCTGTCCCCCTTGTCCTGCCCCCGAACTGCTGGGA |
| | GGCCCTTCCGTGTTCCTGTTCCCCCCAAAGCCCAAGGACACCCTGATGATCAGCCG |
| | GACCCCCGAAGTGACCTGCGTGGTGGTGGATGTGTCCCACGAGGACCCTGAAGTG |
| | AAGTTCAATTGGTACGTGGACGGCGTGGAAGTGCACAACGCCAAGACCAAGCCTA |
| | GAGAGGAACAGTACAACAGCACCTACCGGGTGGTGTCCGTGCTGACAGTGCTGCA |
| | CCAGGACTGGCTGAACGGCAAAGAGTACAAGTGCAAGGTGTCCAACAAGGCCCTG |
| | CCTGCCCCCATCGAGAAAACCATCAGCAAGGCCAAGGGCCAGCCCCGCGAACCCC |
| | AGGTGTACACACTGCCCCCAAGCAGGGACGAGCTGACCAAGAACCAGGTGTCCCT |
| | GACCTGTCTCGTGAAAGGCTTCTACCCCTCCGATATCGCCGTGGAATGGGAGAGCA |
| | ACGGCCAGCCCGAGAACAACTACAAGACCACCCCCCCTGTGCTGGACAGCGACGG |
| | CTCATTCTTCCTGTACAGCAAGCTGACCGTGGACAAGTCCCGGTGGCAGCAGGGCA |
| | ACGTGTTCAGCTGCAGCGTGATGCACGAGGCCCTGCACAACCACTACACCCAGAA |
| | GTCCCTGAGCCTGAGCCCTGGCAAG |
| 825 | CAGTCTGTTCTGACACAGCCTCCATCTGTGTCTGGCGCCCCTGGACAGAGAGTGAC |
| | CATCAGCTGTACAGGCAGCAGCTCCAATATCGGAGCCGGCTACAACGTGCACTGG |
| | TATCAGCAGCTGCCTGGCACAGCCCCTAAACTGCTGATCTACACCAACAACAGACG |
| | GCCCAGCGGCGTGCCCGATAGATTTTCTGGCAGCAAGAGCGGCACAAGCGCCAGC |
| | CTGGCTATCTCTGGACTGAGATCTGAGGACGAGGCCGACTACTATTGCGCCGCCTG |
| | GGATGCTTCTCTGAGCGGATGGGTTTTCGGCGGAGGCACCAAACTGACAGTGCTAG |
| | GCCAGCCTAAAGCCGCCCCTAGCGTGACCCTGTTCCCTCCAAGCAGCGAGGAACTG |
| | CAGGCCAACAAGGCCACCCTCGTGTGCCTGATCAGCGACTTCTATCCTGGCGCCGT |
| | GACCGTGGCCTGGAAGGCCGATAGCTCTCCTGTGAAGGCCGGCGTGGAAACCACC |
| | ACCCCTAGCAAGCAGAGCAACAACAAATACGCCGCCAGCAGCTACCTGAGCCTGA |
| | CCCCCGAGCAGTGGAAGTCCCACAGATCCTACAGCTGCCAAGTGACCCACGAGGG |
| | CAGCACCGTGGAAAAGACAGTGGCCCCTACCGAGTGCAGC |
| 826 | EVQLLESGGGLVQPGGSLRLSCAASGFTFSSYGMHWVRQAPGKGLEWVSAINWNGGS |
| | TGYADSVKGRFTISRDNSKNTLYLQMNSLRAEDTAVYYCARGHHSGYDGRFFDYWG |
| | QGTLVTVSS |
| 827 | SYGMH |
| 828 | AINWNGGSTGYADSVKG |
| 829 | GHHSGYDGRFFDY |
| 830 | QSVLTQPPSVSGTPGQRVTISCTGSSSNIGAGYNVHWYQQLPGTAPKLLIYTNNRRPSG |
| | VPDRFSGSKSGTSASLAISGLRSEDEADYYCAAWDASLSGWVFGGGTKLTVL |
| 831 | TGSSSNIGAGYNVH |
| 832 | TNNRRPS |
| 833 | AAWDASLSGWV |
| 834 | GAAGTTCAGCTGCTGGAATCTGGCGGCGGACTGGTTCAACCTGGCGGATCTCTGAG |
| | ACTGAGCTGTGCCGCCAGCGGCTTCACCTTTAGCAGCTATGGCATGCACTGGGTCC |
| | GACAGGCCCCTGGCAAAGGACTTGAATGGGTGTCCGCCATCAACTGGAATGGCGG |
| | CTCTACAGGCTACGCCGACTCTGTGAAGGGCAGATTCACCATCAGCCGGGACAAC |
| | AGCAAGAACACCCTGTACCTGCAGATGAACTCCCTGAGAGCCGAGGACACCGCCG |
| | TGTACTATTGTGCCAGAGGCCACCACAGCGGCTACGACGGCAGATTCTTTGACTAT |
| | TGGGGCCAGGGCACCCTGGTCACAGTTTCTTCA |
| 835 | AGCTATGGCATGCAC |
| 836 | GCCATCAACTGGAATGGCGGCTCTACAGGCTACGCCGACTCTGTGAAGGGC |
| 837 | GGCCACCACAGCGGCTACGACGGCAGATTCTTTGACTAT |
| 838 | CAGTCTGTTCTGACACAGCCTCCATCCGTGTCTGGCACACCTGGCCAGAGAGTGAC |
| | CATCAGCTGTACCGGCAGCAGCTCCAATATCGGAGCCGGCTACAACGTGCACTGGT |
| | ATCAGCAGCTGCCTGGCACAGCCCCTAAACTGCTGATCTACACCAACAACAGACG |
| | GCCCAGCGGCGTGCCCGATAGATTTTCTGGCTCTAAGAGCGGCACCAGCGCCAGCC |
| | TGGCTATCTCTGGACTGAGATCTGAGGACGAGGCCGACTACTATTGCGCCGCCTGG |
| | GATGCTTCTCTGAGCGGATGGGTTTTCGGCGGAGGCACCAAACTGACAGTGCTA |
| 839 | ACCGGCAGCAGCTCCAATATCGGAGCCGGCTACAACGTGCAC |
| 840 | ACCAACAACAGACGGCCCAGC |
| 841 | GCCGCCTGGGATGCTTCTCTGAGCGGATGGGTT |
| 842 | EVQLLESGGGLVQPGGSLRLSCAASGFTFSSYGMHWVRQAPGKGLEWVSAINWNGGS |
| | TGYADSVKGRFTISRDNSKNTLYLQMNSLRAEDTAVYYCARGHHSGYDGRFFDYWG |
| | QGTLVTVSSASTKGPSVFPLAPSSKSTSGGTAALGCLVKDYFPEPVTVSWNSGALTSGV |
| | HTFPAVLQSSGLYSLSSVVTVPSSSLGTQTYICNVNHKPSNTKVDKKVEPKSCDKTHTC |
| | PPCPAPELLGGPSVFLFPPKPKDTLMISRTPEVTCVVVDVSHEDPEVKFNWYVDGVEV |
| | HNAKTKPREEQYNSTYRVVSVLTVLHQDWLNGKEYKCKVSNKALPAPIEKTISKAKG |
| | QPREPQVYTLPPSRDELTKNQVSLTCLVKGFYPSDIAVEWESNGQPENNYKTTPPVLDS |
| | DGSFFLYSKLTVDKSRWQQGNVFSCSVMHEALHNHYTQKSLSLSPG |
| 843 | QSVLTQPPSVSGTPGQRVTISCTGSSSNIGAGYNVHWYQQLPGTAPKLLIYTNNRRPSG |
| | VPDRFSGSKSGTSASLAISGLRSEDEADYYCAAWDASLSGWVFGGGTKLTVLGQPKA |
| | APSVTLFPPSSEELQANKATLVCLISDFYPGAVTVAWKADSSPVKAGVETTTPSKQSNN |
| | KYAASSYLSLTPEQWKSHRSYSCQVTHEGSTVEKTVAPTECS |
| 844 | GAAGTTCAGCTGCTGGAATCTGGCGGCGGACTGGTTCAACCTGGCGGATCTCTGAG |
| | ACTGAGCTGTGCCGCCAGCGGCTTCACCTTTAGCAGCTATGGCATGCACTGGGTCC |
| | GACAGGCCCCTGGCAAAGGACTTGAATGGGTGTCCGCCATCAACTGGAATGGCGG |
| | CTCTACAGGCTACGCCGACTCTGTGAAGGGCAGATTCACCATCAGCCGGGACAAC |
| | AGCAAGAACACCCTGTACCTGCAGATGAACTCCCTGAGAGCCGAGGACACCGCCG |
| | TGTACTATTGTGCCAGAGGCCACCACAGCGGCTACGACGGCAGATTCTTTGACTAT |
| | TGGGGCCAGGGCACCCTGGTCACAGTTTCTTCAGCCAGCACCAAGGGCCCCAGCGT |
| | GTTCCCTCTGGCCCCTAGCAGCAAGAGCACATCTGGCGGAACAGCCGCCCTGGGCT |
| | GCCTCGTGAAGGACTACTTTCCCGAGCCCGTGACCGTGTCCTGGAACTCTGGCGCT |
| | CTGACAAGCGGCGTGCACACCTTTCCAGCCGTGCTGCAGAGCAGCGGCCTGTACTC |
| | TCTGAGCAGCGTCGTGACAGTGCCCAGCAGCTCTCTGGGCACCCAGACCTACATCT |
| | GCAACGTGAACCACAAGCCCAGCAACACCAAGGTGGACAAGAAGGTGGAACCCA |
| | AGAGCTGCGACAAGACCCACACCTGTCCCCCTTGTCCTGCCCCCGAACTGCTGGGA |
| | GGCCCTTCCGTGTTCCTGTTCCCCCCAAAGCCCAAGGACACCCTGATGATCAGCCG |
| | GACCCCCGAAGTGACCTGCGTGGTGGTGGATGTGTCCCACGAGGACCCTGAAGTG |
| | AAGTTCAATTGGTACGTGGACGGCGTGGAAGTGCACAACGCCAAGACCAAGCCTA |
| | GAGAGGAACAGTACAACAGCACCTACCGGGTGGTGTCCGTGCTGACAGTGCTGCA |
| | CCAGGACTGGCTGAACGGCAAAGAGTACAAGTGCAAGGTGTCCAACAAGGCCCTG |
| | CCTGCCCCCATCGAGAAAACCATCAGCAAGGCCAAGGGCCAGCCCCGCGAACCCC |
| | AGGTGTACACACTGCCCCCAAGCAGGGACGAGCTGACCAAGAACCAGGTGTCCCT |
| | GACCTGTCTCGTGAAAGGCTTCTACCCCTCCGATATCGCCGTGGAATGGGAGAGCA |
| | ACGGCCAGCCCGAGAACAACTACAAGACCACCCCCCCTGTGCTGGACAGCGACGG |
| | CTCATTCTTCCTGTACAGCAAGCTGACCGTGGACAAGTCCCGGTGGCAGCAGGGCA |
| | ACGTGTTCAGCTGCAGCGTGATGCACGAGGCCCTGCACAACCACTACACCCAGAA |
| | GTCCCTGAGCCTGAGCCCTGGC |
| 845 | CAGTCTGTTCTGACACAGCCTCCATCCGTGTCTGGCACACCTGGCCAGAGAGTGAC |
| | CATCAGCTGTACCGGCAGCAGCTCCAATATCGGAGCCGGCTACAACGTGCACTGGT |
| | ATCAGCAGCTGCCTGGCACAGCCCCTAAACTGCTGATCTACACCAACAACAGACG |
| | GCCCAGCGGCGTGCCCGATAGATTTTCTGGCTCTAAGAGCGGCACCAGCGCCAGCC |
| | TGGCTATCTCTGGACTGAGATCTGAGGACGAGGCCGACTACTATTGCGCCGCCTGG |
| | GATGCTTCTCTGAGCGGATGGGTTTTCGGCGGAGGCACCAAACTGACAGTGCTAGG |
| | CCAGCCTAAAGCCGCCCCTAGCGTGACCCTGTTCCCTCCAAGCAGCGAGGAACTGC |
| | AGGCCAACAAGGCCACCCTCGTGTGCCTGATCAGCGACTTCTATCCTGGCGCCGTG |
| | ACCGTGGCCTGGAAGGCCGATAGCTCTCCTGTGAAGGCCGGCGTGGAAACCACCA |
| | CCCCTAGCAAGCAGAGCAACAACAAATACGCCGCCAGCAGCTACCTGAGCCTGAC |
| | CCCCGAGCAGTGGAAGTCCCACAGATCCTACAGCTGCCAAGTGACCCACGAGGGC |
| | AGCACCGTGGAAAAGACAGTGGCCCCTACCGAGTGCAGC |
| 846 | EVQLLESGGGLVQPGGSLRLSCAASGFTFSSYGMHWVRQAPGKGLEWVSAINWNGGS |
| | TGYADSVKGRFTISRDNSKNTLYLQMNSLRAEDTAVYYCARGHHSGYDGRFFDYWG |
| | QGTLVTVSS |
| 847 | SYGMH |
| 848 | AINWNGGSTGYADSVKG |
| 849 | GHHSGYDGRFFDY |
| 850 | QSVLTQPPSASGAPGQRVTISCTGSSSNIGAGYNVHWYQQLPGTAPKLLIYTNNRRPSG |
| | VPDRFSGSKSGTSASLAISGLRSEDEADYYCAAWDASLSGWVFGGGTKLTVL |
| 851 | TGSSSNIGAGYNVH |
| 852 | TNNRRPS |
| 853 | AAWDASLSGWV |
| 854 | GAAGTTCAGCTGCTGGAATCTGGCGGCGGACTGGTTCAACCTGGCGGATCTCTGAG |
| | ACTGAGCTGTGCCGCCAGCGGCTTCACCTTTAGCAGCTATGGCATGCACTGGGTCC |
| | GACAGGCCCCTGGCAAAGGACTTGAATGGGTGTCCGCCATCAACTGGAATGGCGG |
| | CTCTACAGGCTACGCCGACTCTGTGAAGGGCAGATTCACCATCAGCCGGGACAAC |
| | AGCAAGAACACCCTGTACCTGCAGATGAACTCCCTGAGAGCCGAGGACACCGCCG |
| | TGTACTATTGTGCCAGAGGCCACCACAGCGGCTACGACGGCAGATTCTTTGACTAT |
| | TGGGGCCAGGGCACCCTGGTCACAGTTTCTTCA |
| 855 | AGCTATGGCATGCAC |
| 856 | GCCATCAACTGGAATGGCGGCTCTACAGGCTACGCCGACTCTGTGAAGGGC |
| 857 | GGCCACCACAGCGGCTACGACGGCAGATTCTTTGACTAT |
| 858 | CAGTCTGTTCTGACACAGCCTCCATCTGCTAGCGGAGCCCCTGGACAGAGAGTGAC |
| | CATCAGCTGTACAGGCAGCAGCTCCAATATCGGAGCCGGCTACAACGTGCACTGG |
| | TATCAGCAGCTGCCTGGCACAGCCCCTAAACTGCTGATCTACACCAACAACAGACG |
| | GCCCAGCGGCGTGCCCGATAGATTTTCTGGCAGCAAGAGCGGCACAAGCGCCAGC |
| | CTGGCTATCTCTGGACTGAGATCTGAGGACGAGGCCGACTACTATTGCGCCGCCTG |
| | GGATGCTTCTCTGAGCGGATGGGTTTTCGGCGGAGGCACCAAACTGACAGTGCTA |
| 859 | ACAGGCAGCAGCTCCAATATCGGAGCCGGCTACAACGTGCAC |
| 860 | ACCAACAACAGACGGCCCAGC |
| 861 | GCCGCCTGGGATGCTTCTCTGAGCGGATGGGTT |
| 862 | EVQLLESGGGLVQPGGSLRLSCAASGFTFSSYGMHWVRQAPGKGLEWVSAINWNGGS |
| | TGYADSVKGRFTISRDNSKNTLYLQMNSLRAEDTAVYYCARGHHSGYDGRFFDYWG |
| | QGTLVTVSSASTKGPSVFPLAPSSKSTSGGTAALGCLVKDYFPEPVTVSWNSGALTSGV |
| | HTFPAVLQSSGLYSLSSVVTVPSSSLGTQTYICNVNHKPSNTKVDKKVEPKSCDKTHTC |
| | PPCPAPELLGGPSVFLFPPKPKDTLMISRTPEVTCVVVDVSHEDPEVKFNWYVDGVEV |
| | HNAKTKPREEQYNSTYRVVSVLTVLHQDWLNGKEYKCKVSNKALPAPIEKTISKAKG |
| | QPREPQVYTLPPSRDELTKNQVSLTCLVKGFYPSDIAVEWESNGQPENNYKTTPPVLDS |
| | DGSFFLYSKLTVDKSRWQQGNVFSCSVMHEALHNHYTQKSLSLSPG |
| 863 | QSVLTQPPSASGAPGQRVTISCTGSSSNIGAGYNVHWYQQLPGTAPKLLIYTNNRRPSG |
| | VPDRFSGSKSGTSASLAISGLRSEDEADYYCAAWDASLSGWVFGGGTKLTVLGQPKA |
| | APSVTLFPPSSEELQANKATLVCLISDFYPGAVTVAWKADSSPVKAGVETTTPSKQSNN |
| | KYAASSYLSLTPEQWKSHRSYSCQVTHEGSTVEKTVAPTECS |
| 864 | GAAGTTCAGCTGCTGGAATCTGGCGGCGGACTGGTTCAACCTGGCGGATCTCTGAG |
| | ACTGAGCTGTGCCGCCAGCGGCTTCACCTTTAGCAGCTATGGCATGCACTGGGTCC |
| | GACAGGCCCCTGGCAAAGGACTTGAATGGGTGTCCGCCATCAACTGGAATGGCGG |
| | CTCTACAGGCTACGCCGACTCTGTGAAGGGCAGATTCACCATCAGCCGGGACAAC |
| | AGCAAGAACACCCTGTACCTGCAGATGAACTCCCTGAGAGCCGAGGACACCGCCG |
| | TGTACTATTGTGCCAGAGGCCACCACAGCGGCTACGACGGCAGATTCTTTGACTAT |
| | TGGGGCCAGGGCACCCTGGTCACAGTTTCTTCAGCCAGCACCAAGGGCCCCAGCGT |
| | GTTCCCTCTGGCCCCTAGCAGCAAGAGCACATCTGGCGGAACAGCCGCCCTGGGCT |
| | GCCTCGTGAAGGACTACTTTCCCGAGCCCGTGACCGTGTCCTGGAACTCTGGCGCT |
| | CTGACAAGCGGCGTGCACACCTTTCCAGCCGTGCTGCAGAGCAGCGGCCTGTACTC |
| | TCTGAGCAGCGTCGTGACAGTGCCCAGCAGCTCTCTGGGCACCCAGACCTACATCT |
| | GCAACGTGAACCACAAGCCCAGCAACACCAAGGTGGACAAGAAGGTGGAACCCA |
| | AGAGCTGCGACAAGACCCACACCTGTCCCCCTTGTCCTGCCCCCGAACTGCTGGGA |
| | GGCCCTTCCGTGTTCCTGTTCCCCCCAAAGCCCAAGGACACCCTGATGATCAGCCG |
| | GACCCCCGAAGTGACCTGCGTGGTGGTGGATGTGTCCCACGAGGACCCTGAAGTG |
| | AAGTTCAATTGGTACGTGGACGGCGTGGAAGTGCACAACGCCAAGACCAAGCCTA |
| | GAGAGGAACAGTACAACAGCACCTACCGGGTGGTGTCCGTGCTGACAGTGCTGCA |
| | CCAGGACTGGCTGAACGGCAAAGAGTACAAGTGCAAGGTGTCCAACAAGGCCCTG |
| | CCTGCCCCCATCGAGAAAACCATCAGCAAGGCCAAGGGCCAGCCCCGCGAACCCC |
| | AGGTGTACACACTGCCCCCAAGCAGGGACGAGCTGACCAAGAACCAGGTGTCCCT |
| | GACCTGTCTCGTGAAAGGCTTCTACCCCTCCGATATCGCCGTGGAATGGGAGAGCA |
| | ACGGCCAGCCCGAGAACAACTACAAGACCACCCCCCCTGTGCTGGACAGCGACGG |
| | CTCATTCTTCCTGTACAGCAAGCTGACCGTGGACAAGTCCCGGTGGCAGCAGGGCA |
| | ACGTGTTCAGCTGCAGCGTGATGCACGAGGCCCTGCACAACCACTACACCCAGAA |
| | GTCCCTGAGCCTGAGCCCTGGC |
| 865 | CAGTCTGTTCTGACACAGCCTCCATCTGCTAGCGGAGCCCCTGGACAGAGAGTGAC |
| | CATCAGCTGTACAGGCAGCAGCTCCAATATCGGAGCCGGCTACAACGTGCACTGG |
| | TATCAGCAGCTGCCTGGCACAGCCCCTAAACTGCTGATCTACACCAACAACAGACG |
| | GCCCAGCGGCGTGCCCGATAGATTTTCTGGCAGCAAGAGCGGCACAAGCGCCAGC |
| | CTGGCTATCTCTGGACTGAGATCTGAGGACGAGGCCGACTACTATTGCGCCGCCTG |
| | GGATGCTTCTCTGAGCGGATGGGTTTTCGGCGGAGGCACCAAACTGACAGTGCTAG |
| | GCCAGCCTAAAGCCGCCCCTAGCGTGACCCTGTTCCCTCCAAGCAGCGAGGAACTG |
| | CAGGCCAACAAGGCCACCCTCGTGTGCCTGATCAGCGACTTCTATCCTGGCGCCGT |
| | GACCGTGGCCTGGAAGGCCGATAGCTCTCCTGTGAAGGCCGGCGTGGAAACCACC |
| | ACCCCTAGCAAGCAGAGCAACAACAAATACGCCGCCAGCAGCTACCTGAGCCTGA |
| | CCCCCGAGCAGTGGAAGTCCCACAGATCCTACAGCTGCCAAGTGACCCACGAGGG |
| | CAGCACCGTGGAAAAGACAGTGGCCCCTACCGAGTGCAGC |
| 866 | EVQLLESGGGLVQPGGSLRLSCAASGFTFSSYGMHWVRQAPGKGLEWVSGINWNGGS |
| | TGYADSVKGRFTISRDNSKNTLYLQMNSLRAEDTAVYYCARGHHSGYDGRFFDYWG |
| | QGTLVTVSS |
| 867 | SYGMH |
| 868 | GINWNGGSTGYADSVKG |
| 869 | GHHSGYDGRFFDY |
| 870 | QSVLTQPPSVSGAPGQRVTISCTGSSSNIGAGYNVHWYQQLPGTAPKLLIYTNNRRPSG |
| | VPDRFSGSKSGTSASLAISGLRSEDEADYYCAAWDASLSGWVFGGGTKLTVL |
| 871 | TGSSSNIGAGYNVH |
| 872 | TNNRRPS |
| 873 | AAWDASLSGWV |
| 874 | GAAGTTCAGCTGCTGGAATCTGGCGGCGGACTGGTTCAACCTGGCGGATCTCTGAG |
| | ACTGAGCTGTGCCGCCAGCGGCTTCACCTTTAGCAGCTATGGCATGCACTGGGTCC |
| | GACAGGCCCCTGGCAAAGGACTTGAATGGGTGTCCGGCATCAACTGGAATGGCGG |
| | CTCTACAGGCTACGCCGACTCTGTGAAGGGCAGATTCACCATCAGCCGGGACAAC |
| | AGCAAGAACACCCTGTACCTGCAGATGAACTCCCTGAGAGCCGAGGACACCGCCG |
| | TGTACTATTGTGCCAGAGGCCACCACAGCGGCTACGACGGCAGATTCTTTGACTAT |
| | TGGGGCCAGGGCACCCTGGTCACAGTTTCTTCA |
| 875 | AGCTATGGCATGCAC |
| 876 | GGCATCAACTGGAATGGCGGCTCTACAGGCTACGCCGACTCTGTGAAGGGC |
| 877 | GGCCACCACAGCGGCTACGACGGCAGATTCTTTGACTAT |
| 878 | CAGTCTGTTCTGACACAGCCTCCATCTGTGTCTGGCGCCCCTGGACAGAGAGTGAC |
| | CATCAGCTGTACAGGCAGCAGCTCCAATATCGGAGCCGGCTACAACGTGCACTGG |
| | TATCAGCAGCTGCCTGGCACAGCCCCTAAACTGCTGATCTACACCAACAACAGACG |
| | GCCCAGCGGCGTGCCCGATAGATTTTCTGGCAGCAAGAGCGGCACAAGCGCCAGC |
| | CTGGCTATCTCTGGACTGAGATCTGAGGACGAGGCCGACTACTATTGCGCCGCCTG |
| | GGATGCTTCTCTGAGCGGATGGGTTTTCGGCGGAGGCACCAAACTGACAGTGCTA |
| 879 | ACAGGCAGCAGCTCCAATATCGGAGCCGGCTACAACGTGCAC |
| 880 | ACCAACAACAGACGGCCCAGC |
| 881 | GCCGCCTGGGATGCTTCTCTGAGCGGATGGGTT |
| 882 | EVQLLESGGGLVQPGGSLRLSCAASGFTFSSYGMHWVRQAPGKGLEWVSGINWNGGS |
| | TGYADSVKGRFTISRDNSKNTLYLQMNSLRAEDTAVYYCARGHHSGYDGRFFDYWG |
| | QGTLVTVSSASTKGPSVFPLAPSSKSTSGGTAALGCLVKDYFPEPVTVSWNSGALTSGV |
| | HTFPAVLQSSGLYSLSSVVTVPSSSLGTQTYICNVNHKPSNTKVDKKVEPKSCDKTHTC |
| | PPCPAPELLGGPSVFLFPPKPKDTLMISRTPEVTCVVVDVSHEDPEVKFNWYVDGVEV |
| | HNAKTKPREEQYNSTYRVVSVLTVLHQDWLNGKEYKCKVSNKALPAPIEKTISKAKG |
| | QPREPQVYTLPPSRDELTKNQVSLTCLVKGFYPSDIAVEWESNGQPENNYKTTPPVLDS |
| | DGSFFLYSKLTVDKSRWQQGNVFSCSVMHEALHNHYTQKSLSLSPG |
| 883 | QSVLTQPPSVSGAPGQRVTISCTGSSSNIGAGYNVHWYQQLPGTAPKLLIYTNNRRPSG |
| | VPDRFSGSKSGTSASLAISGLRSEDEADYYCAAWDASLSGWVFGGGTKLTVLGQPKA |
| | APSVTLFPPSSEELQANKATLVCLISDFYPGAVTVAWKADSSPVKAGVETTTPSKQSNN |
| | KYAASSYLSLTPEQWKSHRSYSCQVTHEGSTVEKTVAPTECS |
| 884 | GAAGTTCAGCTGCTGGAATCTGGCGGCGGACTGGTTCAACCTGGCGGATCTCTGAG |
| | ACTGAGCTGTGCCGCCAGCGGCTTCACCTTTAGCAGCTATGGCATGCACTGGGTCC |
| | GACAGGCCCCTGGCAAAGGACTTGAATGGGTGTCCGGCATCAACTGGAATGGCGG |
| | CTCTACAGGCTACGCCGACTCTGTGAAGGGCAGATTCACCATCAGCCGGGACAAC |
| | AGCAAGAACACCCTGTACCTGCAGATGAACTCCCTGAGAGCCGAGGACACCGCCG |
| | TGTACTATTGTGCCAGAGGCCACCACAGCGGCTACGACGGCAGATTCTTTGACTAT |
| | TGGGGCCAGGGCACCCTGGTCACAGTTTCTTCAGCCAGCACCAAGGGCCCCAGCGT |
| | GTTCCCTCTGGCCCCTAGCAGCAAGAGCACATCTGGCGGAACAGCCGCCCTGGGCT |
| | GCCTCGTGAAGGACTACTTTCCCGAGCCCGTGACCGTGTCCTGGAACTCTGGCGCT |
| | CTGACAAGCGGCGTGCACACCTTTCCAGCCGTGCTGCAGAGCAGCGGCCTGTACTC |
| | TCTGAGCAGCGTCGTGACAGTGCCCAGCAGCTCTCTGGGCACCCAGACCTACATCT |
| | GCAACGTGAACCACAAGCCCAGCAACACCAAGGTGGACAAGAAGGTGGAACCCA |
| | AGAGCTGCGACAAGACCCACACCTGTCCCCCTTGTCCTGCCCCCGAACTGCTGGGA |
| | GGCCCTTCCGTGTTCCTGTTCCCCCCAAAGCCCAAGGACACCCTGATGATCAGCCG |
| | GACCCCCGAAGTGACCTGCGTGGTGGTGGATGTGTCCCACGAGGACCCTGAAGTG |
| | AAGTTCAATTGGTACGTGGACGGCGTGGAAGTGCACAACGCCAAGACCAAGCCTA |
| | GAGAGGAACAGTACAACAGCACCTACCGGGTGGTGTCCGTGCTGACAGTGCTGCA |
| | CCAGGACTGGCTGAACGGCAAAGAGTACAAGTGCAAGGTGTCCAACAAGGCCCTG |
| | CCTGCCCCCATCGAGAAAACCATCAGCAAGGCCAAGGGCCAGCCCCGCGAACCCC |
| | AGGTGTACACACTGCCCCCAAGCAGGGACGAGCTGACCAAGAACCAGGTGTCCCT |
| | GACCTGTCTCGTGAAAGGCTTCTACCCCTCCGATATCGCCGTGGAATGGGAGAGCA |
| | ACGGCCAGCCCGAGAACAACTACAAGACCACCCCCCCTGTGCTGGACAGCGACGG |
| | CTCATTCTTCCTGTACAGCAAGCTGACCGTGGACAAGTCCCGGTGGCAGCAGGGCA |
| | ACGTGTTCAGCTGCAGCGTGATGCACGAGGCCCTGCACAACCACTACACCCAGAA |
| | GTCCCTGAGCCTGAGCCCTGGC |
| 885 | CAGTCTGTTCTGACACAGCCTCCATCTGTGTCTGGCGCCCCTGGACAGAGAGTGAC |
| | CATCAGCTGTACAGGCAGCAGCTCCAATATCGGAGCCGGCTACAACGTGCACTGG |
| | TATCAGCAGCTGCCTGGCACAGCCCCTAAACTGCTGATCTACACCAACAACAGACG |
| | GCCCAGCGGCGTGCCCGATAGATTTTCTGGCAGCAAGAGCGGCACAAGCGCCAGC |
| | CTGGCTATCTCTGGACTGAGATCTGAGGACGAGGCCGACTACTATTGCGCCGCCTG |
| | GGATGCTTCTCTGAGCGGATGGGTTTTCGGCGGAGGCACCAAACTGACAGTGCTAG |
| | GCCAGCCTAAAGCCGCCCCTAGCGTGACCCTGTTCCCTCCAAGCAGCGAGGAACTG |
| | CAGGCCAACAAGGCCACCCTCGTGTGCCTGATCAGCGACTTCTATCCTGGCGCCGT |
| | GACCGTGGCCTGGAAGGCCGATAGCTCTCCTGTGAAGGCCGGCGTGGAAACCACC |
| | ACCCCTAGCAAGCAGAGCAACAACAAATACGCCGCCAGCAGCTACCTGAGCCTGA |
| | CCCCCGAGCAGTGGAAGTCCCACAGATCCTACAGCTGCCAAGTGACCCACGAGGG |
| | CAGCACCGTGGAAAAGACAGTGGCCCCTACCGAGTGCAGC |
| 886 | EVQLLESGGGLVQPGGSLRLSCAASGFTFSHYGMHWVRQAPGKGLEWVSAINWNGG |
| | STGYADSVKGRFTISRDNSKNTLYLQMNSLRAEDTAVYYCARGHHSGYDGRFFDYW |
| | GQGTLVTVSS |
| 887 | HYGMH |
| 888 | AINWNGGSTGYADSVKG |
| 889 | GHHSGYDGRFFDY |
| 890 | QSVLTQPPSVSGAPGQRVTISCTGSSSNIGAGYNVHWYQQLPGTAPKLLIYTNNRRPSG |
| | VPDRFSGSKSGTSASLAISGLRSEDEADYYCAAWDASLSGWVFGGGTKLTVL |
| 891 | TGSSSNIGAGYNVH |
| 892 | TNNRRPS |
| 893 | AAWDASLSGWV |
| 894 | GAAGTTCAGCTGCTGGAATCTGGCGGCGGACTGGTTCAACCTGGCGGATCTCTGAG |
| | ACTGAGCTGTGCCGCCAGCGGCTTCACCTTTAGCCACTATGGCATGCACTGGGTCC |
| | GACAGGCCCCTGGCAAAGGACTTGAATGGGTGTCCGCCATCAACTGGAATGGCGG |
| | CTCTACAGGCTACGCCGACTCTGTGAAGGGCAGATTCACCATCAGCCGGGACAAC |
| | AGCAAGAACACCCTGTACCTGCAGATGAACTCCCTGAGAGCCGAGGACACCGCCG |
| | TGTACTATTGTGCCAGAGGCCACCACAGCGGCTACGACGGCAGATTCTTTGACTAT |
| | TGGGGCCAGGGCACCCTGGTCACAGTTTCTTCA |
| 895 | CACTATGGCATGCAC |
| 896 | GCCATCAACTGGAATGGCGGCTCTACAGGCTACGCCGACTCTGTGAAGGGC |
| 897 | GGCCACCACAGCGGCTACGACGGCAGATTCTTTGACTAT |
| 898 | CAGTCTGTTCTGACACAGCCTCCATCTGTGTCTGGCGCCCCTGGACAGAGAGTGAC |
| | CATCAGCTGTACAGGCAGCAGCTCCAATATCGGAGCCGGCTACAACGTGCACTGG |
| | TATCAGCAGCTGCCTGGCACAGCCCCTAAACTGCTGATCTACACCAACAACAGACG |
| | GCCCAGCGGCGTGCCCGATAGATTTTCTGGCAGCAAGAGCGGCACAAGCGCCAGC |
| | CTGGCTATCTCTGGACTGAGATCTGAGGACGAGGCCGACTACTATTGCGCCGCCTG |
| | GGATGCTTCTCTGAGCGGATGGGTTTTCGGCGGAGGCACCAAACTGACAGTGCTA |
| 899 | ACAGGCAGCAGCTCCAATATCGGAGCCGGCTACAACGTGCAC |
| 900 | ACCAACAACAGACGGCCCAGC |
| 901 | GCCGCCTGGGATGCTTCTCTGAGCGGATGGGTT |
| 902 | EVQLLESGGGLVQPGGSLRLSCAASGFTFSHYGMHWVRQAPGKGLEWVSAINWNGG |
| | STGYADSVKGRFTISRDNSKNTLYLQMNSLRAEDTAVYYCARGHHSGYDGRFFDYW |
| | GQGTLVTVSSASTKGPSVFPLAPSSKSTSGGTAALGCLVKDYFPEPVTVSWNSGALTSG |
| | VHTFPAVLQSSGLYSLSSVVTVPSSSLGTQTYICNVNHKPSNTKVDKKVEPKSCDKTHT |
| | CPPCPAPELLGGPSVFLFPPKPKDTLMISRTPEVTCVVVDVSHEDPEVKFNWYVDGVE |
| | VHNAKTKPREEQYNSTYRVVSVLTVLHQDWLNGKEYKCKVSNKALPAPIEKTISKAK |
| | GQPREPQVYTLPPSRDELTKNQVSLTCLVKGFYPSDIAVEWESNGQPENNYKTTPPVL |
| | DSDGSFFLYSKLTVDKSRWQQGNVFSCSVMHEALHNHYTQKSLSLSPG |
| 903 | QSVLTQPPSVSGAPGQRVTISCTGSSSNIGAGYNVHWYQQLPGTAPKLLIYTNNRRPSG |
| | APSVTLFPPSSEELQANKATLVCLISDFYPGAVTVAWKADSSPVKAGVETTTPSKQSNN |
| | KYAASSYLSLTPEQWKSHRSYSCQVTHEGSTVEKTVAPTECS |
| | GAAGTTCAGCTGCTGGAATCTGGCGGCGGACTGGTTCAACCTGGCGGATCTCTGAG |
| | ACTGAGCTGTGCCGCCAGCGGCTTCACCTTTAGCCACTATGGCATGCACTGGGTCC |
| | GACAGGCCCCTGGCAAAGGACTTGAATGGGTGTCCGCCATCAACTGGAATGGCGG |
| | CTCTACAGGCTACGCCGACTCTGTGAAGGGCAGATTCACCATCAGCCGGGACAAC |
| | AGCAAGAACACCCTGTACCTGCAGATGAACTCCCTGAGAGCCGAGGACACCGCCG |
| | TGTACTATTGTGCCAGAGGCCACCACAGCGGCTACGACGGCAGATTCTTTGACTAT |
| | TGGGGCCAGGGCACCCTGGTCACAGTTTCTTCAGCCAGCACCAAGGGCCCCAGCGT |
| | GTTCCCTCTGGCCCCTAGCAGCAAGAGCACATCTGGCGGAACAGCCGCCCTGGGCT |
| | GCCTCGTGAAGGACTACTTTCCCGAGCCCGTGACCGTGTCCTGGAACTCTGGCGCT |
| | CTGACAAGCGGCGTGCACACCTTTCCAGCCGTGCTGCAGAGCAGCGGCCTGTACTC |
| | TCTGAGCAGCGTCGTGACAGTGCCCAGCAGCTCTCTGGGCACCCAGACCTACATCT |
| | GCAACGTGAACCACAAGCCCAGCAACACCAAGGTGGACAAGAAGGTGGAACCCA |
| | AGAGCTGCGACAAGACCCACACCTGTCCCCCTTGTCCTGCCCCCGAACTGCTGGGA |
| | GGCCCTTCCGTGTTCCTGTTCCCCCCAAAGCCCAAGGACACCCTGATGATCAGCCG |
| | GACCCCCGAAGTGACCTGCGTGGTGGTGGATGTGTCCCACGAGGACCCTGAAGTG |
| | AAGTTCAATTGGTACGTGGACGGCGTGGAAGTGCACAACGCCAAGACCAAGCCTA |
| | GAGAGGAACAGTACAACAGCACCTACCGGGTGGTGTCCGTGCTGACAGTGCTGCA |
| | CCAGGACTGGCTGAACGGCAAAGAGTACAAGTGCAAGGTGTCCAACAAGGCCCTG |
| | CCTGCCCCCATCGAGAAAACCATCAGCAAGGCCAAGGGCCAGCCCCGCGAACCCC |
| | AGGTGTACACACTGCCCCCAAGCAGGGACGAGCTGACCAAGAACCAGGTGTCCCT |
| | GACCTGTCTCGTGAAAGGCTTCTACCCCTCCGATATCGCCGTGGAATGGGAGAGCA |
| | ACGGCCAGCCCGAGAACAACTACAAGACCACCCCCCCTGTGCTGGACAGCGACGG |
| | CTCATTCTTCCTGTACAGCAAGCTGACCGTGGACAAGTCCCGGTGGCAGCAGGGCA |
| | ACGTGTTCAGCTGCAGCGTGATGCACGAGGCCCTGCACAACCACTACACCCAGAA |
| | GTCCCTGAGCCTGAGCCCTGGC |
| 904 | VPDRFSGSKSGTSASLAISGLRSEDEADYYCAAWDASLSGWVFGGGTKLTVLGQPKA |
| 905 | CAGTCTGTTCTGACACAGCCTCCATCTGTGTCTGGCGCCCCTGGACAGAGAGTGAC |
| | CATCAGCTGTACAGGCAGCAGCTCCAATATCGGAGCCGGCTACAACGTGCACTGG |
| | TATCAGCAGCTGCCTGGCACAGCCCCTAAACTGCTGATCTACACCAACAACAGACG |
| | GCCCAGCGGCGTGCCCGATAGATTTTCTGGCAGCAAGAGCGGCACAAGCGCCAGC |
| | CTGGCTATCTCTGGACTGAGATCTGAGGACGAGGCCGACTACTATTGCGCCGCCTG |
| | GGATGCTTCTCTGAGCGGATGGGTTTTCGGCGGAGGCACCAAACTGACAGTGCTAG |
| | GCCAGCCTAAAGCCGCCCCTAGCGTGACCCTGTTCCCTCCAAGCAGCGAGGAACTG |
| | CAGGCCAACAAGGCCACCCTCGTGTGCCTGATCAGCGACTTCTATCCTGGCGCCGT |
| | GACCGTGGCCTGGAAGGCCGATAGCTCTCCTGTGAAGGCCGGCGTGGAAACCACC |
| | ACCCCTAGCAAGCAGAGCAACAACAAATACGCCGCCAGCAGCTACCTGAGCCTGA |
| | CCCCCGAGCAGTGGAAGTCCCACAGATCCTACAGCTGCCAAGTGACCCACGAGGG |
| | CAGCACCGTGGAAAAGACAGTGGCCCCTACCGAGTGCAGC |
| 906 | EVQLLESGGGLVQPGGSLRLSCAASGFTFSHYGMHWVRQAPGKGLEWVSGINWNGG |
| | STGYADSVKGRFTISRDNSKNTLYLQMNSLRAEDTAVYYCARGHHSGYDGRFFDYW |
| | GQGTLVTVSS |
| 907 | HYGMH |
| 908 | GINWNGGSTGYADSVKG |
| 909 | GHHSGYDGRFFDY |
| 910 | QSVLTQPPSASGTPGQRVTISCTGSSSNIGAGYNVHWYQQLPGTAPKLLIYTNNRRPSG |
| | VPDRFSGSKSGTSASLAISGLRSEDEADYYCAAWDASLSGWVFGGGTKLTVL |
| 911 | TGSSSNIGAGYNVH |
| 912 | TNNRRPS |
| 913 | AAWDASLSGWV |
| 914 | GAAGTTCAGCTGCTGGAATCTGGCGGCGGACTGGTTCAACCTGGCGGATCTCTGAG |
| | ACTGAGCTGTGCCGCCAGCGGCTTCACCTTTAGCCACTATGGCATGCACTGGGTCC |
| | GACAGGCCCCTGGCAAAGGACTTGAATGGGTGTCCGGCATCAACTGGAATGGCGG |
| | CTCTACAGGCTACGCCGACTCTGTGAAGGGCAGATTCACCATCAGCCGGGACAAC |
| | AGCAAGAACACCCTGTACCTGCAGATGAACTCCCTGAGAGCCGAGGACACCGCCG |
| | TGTACTATTGTGCCAGAGGCCACCACAGCGGCTACGACGGCAGATTCTTTGACTAT |
| | TGGGGCCAGGGCACCCTGGTCACAGTTTCTTCA |
| 915 | CACTATGGCATGCAC |
| 916 | GGCATCAACTGGAATGGCGGCTCTACAGGCTACGCCGACTCTGTGAAGGGC |
| 917 | GGCCACCACAGCGGCTACGACGGCAGATTCTTTGACTAT |
| 918 | CAGTCTGTTCTGACACAGCCTCCTAGCGCCTCTGGCACACCTGGACAGAGAGTGAC |
| | CATCAGCTGTACCGGCAGCAGCTCCAATATCGGAGCCGGCTACAACGTGCACTGGT |
| | ATCAGCAGCTGCCTGGCACAGCCCCTAAACTGCTGATCTACACCAACAACAGACG |
| | GCCCAGCGGCGTGCCCGATAGATTTTCTGGCAGCAAGAGCGGCACAAGCGCCAGC |
| | CTGGCTATCTCTGGACTGAGATCTGAGGACGAGGCCGACTACTATTGCGCCGCCTG |
| | GGATGCTTCTCTGAGCGGATGGGTTTTCGGCGGAGGCACCAAACTGACAGTGCTA |
| 919 | ACCGGCAGCAGCTCCAATATCGGAGCCGGCTACAACGTGCAC |
| 920 | ACCAACAACAGACGGCCCAGC |
| 921 | GCCGCCTGGGATGCTTCTCTGAGCGGATGGGTT |
| 922 | EVQLLESGGGLVQPGGSLRLSCAASGFTFSHYGMHWVRQAPGKGLEWVSGINWNGG |
| | STGYADSVKGRFTISRDNSKNTLYLQMNSLRAEDTAVYYCARGHHSGYDGRFFDYW |
| | GQGTLVTVSSASTKGPSVFPLAPSSKSTSGGTAALGCLVKDYFPEPVTVSWNSGALTSG |
| | VHTFPAVLQSSGLYSLSSVVTVPSSSLGTQTYICNVNHKPSNTKVDKKVEPKSCDKTHT |
| | CPPCPAPELLGGPSVFLFPPKPKDTLMISRTPEVTCVVVDVSHEDPEVKFNWYVDGVE |
| | VHNAKTKPREEQYNSTYRVVSVLTVLHQDWLNGKEYKCKVSNKALPAPIEKTISKAK |
| | GQPREPQVYTLPPSRDELTKNQVSLTCLVKGFYPSDIAVEWESNGQPENNYKTTPPVL |
| | DSDGSFFLYSKLTVDKSRWQQGNVFSCSVMHEALHNHYTQKSLSLSPGK |
| 923 | QSVLTQPPSASGTPGQRVTISCTGSSSNIGAGYNVHWYQQLPGTAPKLLIYTNNRRPSG |
| | VPDRFSGSKSGTSASLAISGLRSEDEADYYCAAWDASLSGWVFGGGTKLTVLGQPKA |
| | APSVTLFPPSSEELQANKATLVCLISDFYPGAVTVAWKADSSPVKAGVETTTPSKQSNN |
| | KYAASSYLSLTPEQWKSHRSYSCQVTHEGSTVEKTVAPTECS |
| 924 | GAAGTTCAGCTGCTGGAATCTGGCGGCGGACTGGTTCAACCTGGCGGATCTCTGAG |
| | ACTGAGCTGTGCCGCCAGCGGCTTCACCTTTAGCCACTATGGCATGCACTGGGTCC |
| | GACAGGCCCCTGGCAAAGGACTTGAATGGGTGTCCGGCATCAACTGGAATGGCGG |
| | CTCTACAGGCTACGCCGACTCTGTGAAGGGCAGATTCACCATCAGCCGGGACAAC |
| | AGCAAGAACACCCTGTACCTGCAGATGAACTCCCTGAGAGCCGAGGACACCGCCG |
| | TGTACTATTGTGCCAGAGGCCACCACAGCGGCTACGACGGCAGATTCTTTGACTAT |
| | TGGGGCCAGGGCACCCTGGTCACAGTTTCTTCAGCCAGCACCAAGGGCCCCAGCGT |
| | GTTCCCTCTGGCCCCTAGCAGCAAGAGCACATCTGGCGGAACAGCCGCCCTGGGCT |
| | GCCTCGTGAAGGACTACTTTCCCGAGCCCGTGACCGTGTCCTGGAACTCTGGCGCT |
| | CTGACAAGCGGCGTGCACACCTTTCCAGCCGTGCTGCAGAGCAGCGGCCTGTACTC |
| | TCTGAGCAGCGTCGTGACAGTGCCCAGCAGCTCTCTGGGCACCCAGACCTACATCT |
| | GCAACGTGAACCACAAGCCCAGCAACACCAAGGTGGACAAGAAGGTGGAACCCA |
| | AGAGCTGCGACAAGACCCACACCTGTCCCCCTTGTCCTGCCCCCGAACTGCTGGGA |
| | GGCCCTTCCGTGTTCCTGTTCCCCCCAAAGCCCAAGGACACCCTGATGATCAGCCG |
| | GACCCCCGAAGTGACCTGCGTGGTGGTGGATGTGTCCCACGAGGACCCTGAAGTG |
| | AAGTTCAATTGGTACGTGGACGGCGTGGAAGTGCACAACGCCAAGACCAAGCCTA |
| | GAGAGGAACAGTACAACAGCACCTACCGGGTGGTGTCCGTGCTGACAGTGCTGCA |
| | CCAGGACTGGCTGAACGGCAAAGAGTACAAGTGCAAGGTGTCCAACAAGGCCCTG |
| | CCTGCCCCCATCGAGAAAACCATCAGCAAGGCCAAGGGCCAGCCCCGCGAACCCC |
| | AGGTGTACACACTGCCCCCAAGCAGGGACGAGCTGACCAAGAACCAGGTGTCCCT |
| | GACCTGTCTCGTGAAAGGCTTCTACCCCTCCGATATCGCCGTGGAATGGGAGAGCA |
| | ACGGCCAGCCCGAGAACAACTACAAGACCACCCCCCCTGTGCTGGACAGCGACGG |
| | CTCATTCTTCCTGTACAGCAAGCTGACCGTGGACAAGTCCCGGTGGCAGCAGGGCA |
| | ACGTGTTCAGCTGCAGCGTGATGCACGAGGCCCTGCACAACCACTACACCCAGAA |
| | GTCCCTGAGCCTGAGCCCTGGCAAG |
| 925 | CAGTCTGTTCTGACACAGCCTCCTAGCGCCTCTGGCACACCTGGACAGAGAGTGAC |
| | CATCAGCTGTACCGGCAGCAGCTCCAATATCGGAGCCGGCTACAACGTGCACTGGT |
| | ATCAGCAGCTGCCTGGCACAGCCCCTAAACTGCTGATCTACACCAACAACAGACG |
| | GCCCAGCGGCGTGCCCGATAGATTTTCTGGCAGCAAGAGCGGCACAAGCGCCAGC |
| | CTGGCTATCTCTGGACTGAGATCTGAGGACGAGGCCGACTACTATTGCGCCGCCTG |
| | GGATGCTTCTCTGAGCGGATGGGTTTTCGGCGGAGGCACCAAACTGACAGTGCTAG |
| | GCCAGCCTAAAGCCGCCCCTAGCGTGACCCTGTTCCCTCCAAGCAGCGAGGAACTG |
| | CAGGCCAACAAGGCCACCCTCGTGTGCCTGATCAGCGACTTCTATCCTGGCGCCGT |
| | GACCGTGGCCTGGAAGGCCGATAGCTCTCCTGTGAAGGCCGGCGTGGAAACCACC |
| | ACCCCTAGCAAGCAGAGCAACAACAAATACGCCGCCAGCAGCTACCTGAGCCTGA |
| | CCCCCGAGCAGTGGAAGTCCCACAGATCCTACAGCTGCCAAGTGACCCACGAGGG |
| | CAGCACCGTGGAAAAGACAGTGGCCCCTACCGAGTGCAGC |
| 926 | EVQLLESGGGLVQPGGSLRLSCAASGFTFSHYGMHWVRQAPGKGLEWVSGINWNGG |
| | STGYADSVKGRFTISRDNSKNTLYLQMNSLRAEDTAVYYCARGHHSGYDGRFFDYW |
| | GQGTLVTVSS |
| 927 | HYGMH |
| 928 | GINWNGGSTGYADSVKG |
| 929 | GHHSGYDGRFFDY |
| 930 | QSVLTQPPSVSGAPGQRVTISCTGSSSNIGAGYNVHWYQQLPGTAPKLLIYTNNRRPSG |
| | VPDRFSGSKSGTSASLAISGLRSEDEADYYCAAWDASLSGWVFGGGTKLTVL |
| 931 | TGSSSNIGAGYNVH |
| 932 | TNNRRPS |
| 933 | AAWDASLSGWV |
| 934 | GAAGTTCAGCTGCTGGAATCTGGCGGCGGACTGGTTCAACCTGGCGGATCTCTGAG |
| | ACTGAGCTGTGCCGCCAGCGGCTTCACCTTTAGCCACTATGGCATGCACTGGGTCC |
| | GACAGGCCCCTGGCAAAGGACTTGAATGGGTGTCCGGCATCAACTGGAATGGCGG |
| | CTCTACAGGCTACGCCGACTCTGTGAAGGGCAGATTCACCATCAGCCGGGACAAC |
| | AGCAAGAACACCCTGTACCTGCAGATGAACTCCCTGAGAGCCGAGGACACCGCCG |
| | TGTACTATTGTGCCAGAGGCCACCACAGCGGCTACGACGGCAGATTCTTTGACTAT |
| | TGGGGCCAGGGCACCCTGGTCACAGTTTCTTCA |
| 935 | CACTATGGCATGCAC |
| 936 | GGCATCAACTGGAATGGCGGCTCTACAGGCTACGCCGACTCTGTGAAGGGC |
| 937 | GGCCACCACAGCGGCTACGACGGCAGATTCTTTGACTAT |
| 938 | CAGTCTGTTCTGACACAGCCTCCATCTGTGTCTGGCGCCCCTGGACAGAGAGTGAC |
| | CATCAGCTGTACAGGCAGCAGCTCCAATATCGGAGCCGGCTACAACGTGCACTGG |
| | TATCAGCAGCTGCCTGGCACAGCCCCTAAACTGCTGATCTACACCAACAACAGACG |
| | GCCCAGCGGCGTGCCCGATAGATTTTCTGGCAGCAAGAGCGGCACAAGCGCCAGC |
| | CTGGCTATCTCTGGACTGAGATCTGAGGACGAGGCCGACTACTATTGCGCCGCCTG |
| | GGATGCTTCTCTGAGCGGATGGGTTTTCGGCGGAGGCACCAAACTGACAGTGCTA |
| 939 | ACAGGCAGCAGCTCCAATATCGGAGCCGGCTACAACGTGCAC |
| 940 | ACCAACAACAGACGGCCCAGC |
| 941 | GCCGCCTGGGATGCTTCTCTGAGCGGATGGGTT |
| 942 | EVQLLESGGGLVQPGGSLRLSCAASGFTFSHYGMHWVRQAPGKGLEWVSGINWNGG |
| | STGYADSVKGRFTISRDNSKNTLYLQMNSLRAEDTAVYYCARGHHSGYDGRFFDYW |
| | GQGTLVTVSSASTKGPSVFPLAPSSKSTSGGTAALGCLVKDYFPEPVTVSWNSGALTSG |
| | VHTFPAVLQSSGLYSLSSVVTVPSSSLGTQTYICNVNHKPSNTKVDKKVEPKSCDKTHT |
| | CPPCPAPELLGGPSVFLFPPKPKDTLMISRTPEVTCVVVDVSHEDPEVKFNWYVDGVE |
| | VHNAKTKPREEQYNSTYRVVSVLTVLHQDWLNGKEYKCKVSNKALPAPIEKTISKAK |
| | GQPREPQVYTLPPSRDELTKNQVSLTCLVKGFYPSDIAVEWESNGQPENNYKTTPPVL |
| | DSDGSFFLYSKLTVDKSRWQQGNVFSCSVMHEALHNHYTQKSLSLSPGK |
| 943 | QSVLTQPPSVSGAPGQRVTISCTGSSSNIGAGYNVHWYQQLPGTAPKLLIYTNNRRPSG |
| | VPDRFSGSKSGTSASLAISGLRSEDEADYYCAAWDASLSGWVFGGGTKLTVLGQPKA |
| | APSVTLFPPSSEELQANKATLVCLISDFYPGAVTVAWKADSSPVKAGVETTTPSKQSNN |
| | KYAASSYLSLTPEQWKSHRSYSCQVTHEGSTVEKTVAPTECS |
| 944 | GAAGTTCAGCTGCTGGAATCTGGCGGCGGACTGGTTCAACCTGGCGGATCTCTGAG |
| | ACTGAGCTGTGCCGCCAGCGGCTTCACCTTTAGCCACTATGGCATGCACTGGGTCC |
| | GACAGGCCCCTGGCAAAGGACTTGAATGGGTGTCCGGCATCAACTGGAATGGCGG |
| | CTCTACAGGCTACGCCGACTCTGTGAAGGGCAGATTCACCATCAGCCGGGACAAC |
| | AGCAAGAACACCCTGTACCTGCAGATGAACTCCCTGAGAGCCGAGGACACCGCCG |
| | TGTACTATTGTGCCAGAGGCCACCACAGCGGCTACGACGGCAGATTCTTTGACTAT |
| | TGGGGCCAGGGCACCCTGGTCACAGTTTCTTCAGCCAGCACCAAGGGCCCCAGCGT |
| | GTTCCCTCTGGCCCCTAGCAGCAAGAGCACATCTGGCGGAACAGCCGCCCTGGGCT |
| | GCCTCGTGAAGGACTACTTTCCCGAGCCCGTGACCGTGTCCTGGAACTCTGGCGCT |
| | CTGACAAGCGGCGTGCACACCTTTCCAGCCGTGCTGCAGAGCAGCGGCCTGTACTC |
| | TCTGAGCAGCGTCGTGACAGTGCCCAGCAGCTCTCTGGGCACCCAGACCTACATCT |
| | GCAACGTGAACCACAAGCCCAGCAACACCAAGGTGGACAAGAAGGTGGAACCCA |
| | AGAGCTGCGACAAGACCCACACCTGTCCCCCTTGTCCTGCCCCCGAACTGCTGGGA |
| | GGCCCTTCCGTGTTCCTGTTCCCCCCAAAGCCCAAGGACACCCTGATGATCAGCCG |
| | GACCCCCGAAGTGACCTGCGTGGTGGTGGATGTGTCCCACGAGGACCCTGAAGTG |
| | AAGTTCAATTGGTACGTGGACGGCGTGGAAGTGCACAACGCCAAGACCAAGCCTA |
| | GAGAGGAACAGTACAACAGCACCTACCGGGTGGTGTCCGTGCTGACAGTGCTGCA |
| | CCAGGACTGGCTGAACGGCAAAGAGTACAAGTGCAAGGTGTCCAACAAGGCCCTG |
| | CCTGCCCCCATCGAGAAAACCATCAGCAAGGCCAAGGGCCAGCCCCGCGAACCCC |
| | AGGTGTACACACTGCCCCCAAGCAGGGACGAGCTGACCAAGAACCAGGTGTCCCT |
| | GACCTGTCTCGTGAAAGGCTTCTACCCCTCCGATATCGCCGTGGAATGGGAGAGCA |
| | ACGGCCAGCCCGAGAACAACTACAAGACCACCCCCCCTGTGCTGGACAGCGACGG |
| | CTCATTCTTCCTGTACAGCAAGCTGACCGTGGACAAGTCCCGGTGGCAGCAGGGCA |
| | ACGTGTTCAGCTGCAGCGTGATGCACGAGGCCCTGCACAACCACTACACCCAGAA |
| | GTCCCTGAGCCTGAGCCCTGGCAAG |
| 945 | CAGTCTGTTCTGACACAGCCTCCATCTGTGTCTGGCGCCCCTGGACAGAGAGTGAC |
| | CATCAGCTGTACAGGCAGCAGCTCCAATATCGGAGCCGGCTACAACGTGCACTGG |
| | TATCAGCAGCTGCCTGGCACAGCCCCTAAACTGCTGATCTACACCAACAACAGACG |
| | GCCCAGCGGCGTGCCCGATAGATTTTCTGGCAGCAAGAGCGGCACAAGCGCCAGC |
| | CTGGCTATCTCTGGACTGAGATCTGAGGACGAGGCCGACTACTATTGCGCCGCCTG |
| | GGATGCTTCTCTGAGCGGATGGGTTTTCGGCGGAGGCACCAAACTGACAGTGCTAG |
| | GCCAGCCTAAAGCCGCCCCTAGCGTGACCCTGTTCCCTCCAAGCAGCGAGGAACTG |
| | CAGGCCAACAAGGCCACCCTCGTGTGCCTGATCAGCGACTTCTATCCTGGCGCCGT |
| | GACCGTGGCCTGGAAGGCCGATAGCTCTCCTGTGAAGGCCGGCGTGGAAACCACC |
| | ACCCCTAGCAAGCAGAGCAACAACAAATACGCCGCCAGCAGCTACCTGAGCCTGA |
| | CCCCCGAGCAGTGGAAGTCCCACAGATCCTACAGCTGCCAAGTGACCCACGAGGG |
| | CAGCACCGTGGAAAAGACAGTGGCCCCTACCGAGTGCAGC |
| 946 | EVQLLESGGGLVQPGGSLRLSCAASGFTFSSYGMHWVRQAPGKGLEWVSAINWNGGS |
| | TGYADSVKGRFTISRDNSKNTLYLQMNSLRAEDTAVYYCARGHHSGYDGRFFDYWG |
| | QGTLVTVSS |
| 947 | SYGMH |
| 948 | AINWNGGSTGYADSVKG |
| 949 | GHHSGYDGRFFDY |
| 950 | QSVLTQPPSASGTPGQRVTISCTGSSSNIGAGYNVHWYQQLPGTAPKLLIYTNNRRPSG |
| | VPDRFSGSKSGTSASLAISGLRSEDEADYYCAAWDASLSGWVFGGGTKLTVL |
| 951 | TGSSSNIGAGYNVH |
| 952 | TNNRRPS |
| 953 | AAWDASLSGWV |
| 954 | GAAGTTCAGCTGCTGGAATCTGGCGGCGGACTGGTTCAACCTGGCGGATCTCTGAG |
| | ACTGAGCTGTGCCGCCAGCGGCTTCACCTTTAGCAGCTATGGCATGCACTGGGTCC |
| | GACAGGCCCCTGGCAAAGGACTTGAATGGGTGTCCGCCATCAACTGGAATGGCGG |
| | CTCTACAGGCTACGCCGACTCTGTGAAGGGCAGATTCACCATCAGCCGGGACAAC |
| | AGCAAGAACACCCTGTACCTGCAGATGAACTCCCTGAGAGCCGAGGACACCGCCG |
| | TGTACTATTGTGCCAGAGGCCACCACAGCGGCTACGACGGCAGATTCTTTGACTAT |
| | TGGGGCCAGGGCACCCTGGTCACAGTTTCTTCA |
| 955 | AGCTATGGCATGCAC |
| 956 | GCCATCAACTGGAATGGCGGCTCTACAGGCTACGCCGACTCTGTGAAGGGC |
| 957 | GGCCACCACAGCGGCTACGACGGCAGATTCTTTGACTAT |
| 958 | CAGTCTGTTCTGACACAGCCTCCTAGCGCCTCTGGCACACCTGGACAGAGAGTGAC |
| | CATCAGCTGTACCGGCAGCAGCTCCAATATCGGAGCCGGCTACAACGTGCACTGGT |
| | ATCAGCAGCTGCCTGGCACAGCCCCTAAACTGCTGATCTACACCAACAACAGACG |
| | GCCCAGCGGCGTGCCCGATAGATTTTCTGGCAGCAAGAGCGGCACAAGCGCCAGC |
| | CTGGCTATCTCTGGACTGAGATCTGAGGACGAGGCCGACTACTATTGCGCCGCCTG |
| | GGATGCTTCTCTGAGCGGATGGGTTTTCGGCGGAGGCACCAAACTGACAGTGCTA |
| 959 | ACCGGCAGCAGCTCCAATATCGGAGCCGGCTACAACGTGCAC |
| 960 | ACCAACAACAGACGGCCCAGC |
| 961 | GCCGCCTGGGATGCTTCTCTGAGCGGATGGGTT |
| 962 | EVQLLESGGGLVQPGGSLRLSCAASGFTFSSYGMHWVRQAPGKGLEWVSAINWNGGS |
| | TGYADSVKGRFTISRDNSKNTLYLQMNSLRAEDTAVYYCARGHHSGYDGRFFDYWG |
| | QGTLVTVSSASTKGPSVFPLAPSSKSTSGGTAALGCLVKDYFPEPVTVSWNSGALTSGV |
| | HTFPAVLQSSGLYSLSSVVTVPSSSLGTQTYICNVNHKPSNTKVDKKVEPKSCDKTHTC |
| | PPCPAPELLGGPSVFLFPPKPKDTLMISRTPEVTCVVVDVSHEDPEVKFNWYVDGVEV |
| | HNAKTKPREEQYNSTYRVVSVLTVLHQDWLNGKEYKCKVSNKALPAPIEKTISKAKG |
| | QPREPQVYTLPPSRDELTKNQVSLTCLVKGFYPSDIAVEWESNGQPENNYKTTPPVLDS |
| | DGSFFLYSKLTVDKSRWQQGNVFSCSVMHEALHNHYTQKSLSLSPGK |
| 963 | QSVLTQPPSASGTPGQRVTISCTGSSSNIGAGYNVHWYQQLPGTAPKLLIYTNNRRPSG |
| | VPDRFSGSKSGTSASLAISGLRSEDEADYYCAAWDASLSGWVFGGGTKLTVLGQPKA |
| | APSVTLFPPSSEELQANKATLVCLISDFYPGAVTVAWKADSSPVKAGVETTTPSKQSNN |
| | KYAASSYLSLTPEQWKSHRSYSCQVTHEGSTVEKTVAPTECS |
| 964 | GAAGTTCAGCTGCTGGAATCTGGCGGCGGACTGGTTCAACCTGGCGGATCTCTGAG |
| | ACTGAGCTGTGCCGCCAGCGGCTTCACCTTTAGCAGCTATGGCATGCACTGGGTCC |
| | GACAGGCCCCTGGCAAAGGACTTGAATGGGTGTCCGCCATCAACTGGAATGGCGG |
| | CTCTACAGGCTACGCCGACTCTGTGAAGGGCAGATTCACCATCAGCCGGGACAAC |
| | AGCAAGAACACCCTGTACCTGCAGATGAACTCCCTGAGAGCCGAGGACACCGCCG |
| | TGTACTATTGTGCCAGAGGCCACCACAGCGGCTACGACGGCAGATTCTTTGACTAT |
| | TGGGGCCAGGGCACCCTGGTCACAGTTTCTTCAGCCAGCACCAAGGGCCCCAGCGT |
| | GTTCCCTCTGGCCCCTAGCAGCAAGAGCACATCTGGCGGAACAGCCGCCCTGGGCT |
| | GCCTCGTGAAGGACTACTTTCCCGAGCCCGTGACCGTGTCCTGGAACTCTGGCGCT |
| | CTGACAAGCGGCGTGCACACCTTTCCAGCCGTGCTGCAGAGCAGCGGCCTGTACTC |
| | TCTGAGCAGCGTCGTGACAGTGCCCAGCAGCTCTCTGGGCACCCAGACCTACATCT |
| | GCAACGTGAACCACAAGCCCAGCAACACCAAGGTGGACAAGAAGGTGGAACCCA |
| | AGAGCTGCGACAAGACCCACACCTGTCCCCCTTGTCCTGCCCCCGAACTGCTGGGA |
| | GGCCCTTCCGTGTTCCTGTTCCCCCCAAAGCCCAAGGACACCCTGATGATCAGCCG |
| | GACCCCCGAAGTGACCTGCGTGGTGGTGGATGTGTCCCACGAGGACCCTGAAGTG |
| | AAGTTCAATTGGTACGTGGACGGCGTGGAAGTGCACAACGCCAAGACCAAGCCTA |
| | GAGAGGAACAGTACAACAGCACCTACCGGGTGGTGTCCGTGCTGACAGTGCTGCA |
| | CCAGGACTGGCTGAACGGCAAAGAGTACAAGTGCAAGGTGTCCAACAAGGCCCTG |
| | CCTGCCCCCATCGAGAAAACCATCAGCAAGGCCAAGGGCCAGCCCCGCGAACCCC |
| | AGGTGTACACACTGCCCCCAAGCAGGGACGAGCTGACCAAGAACCAGGTGTCCCT |
| | GACCTGTCTCGTGAAAGGCTTCTACCCCTCCGATATCGCCGTGGAATGGGAGAGCA |
| | ACGGCCAGCCCGAGAACAACTACAAGACCACCCCCCCTGTGCTGGACAGCGACGG |
| | CTCATTCTTCCTGTACAGCAAGCTGACCGTGGACAAGTCCCGGTGGCAGCAGGGCA |
| | ACGTGTTCAGCTGCAGCGTGATGCACGAGGCCCTGCACAACCACTACACCCAGAA |
| | GTCCCTGAGCCTGAGCCCTGGCAAG |
| 965 | CAGTCTGTTCTGACACAGCCTCCTAGCGCCTCTGGCACACCTGGACAGAGAGTGAC |
| | CATCAGCTGTACCGGCAGCAGCTCCAATATCGGAGCCGGCTACAACGTGCACTGGT |
| | ATCAGCAGCTGCCTGGCACAGCCCCTAAACTGCTGATCTACACCAACAACAGACG |
| | GCCCAGCGGCGTGCCCGATAGATTTTCTGGCAGCAAGAGCGGCACAAGCGCCAGC |
| | CTGGCTATCTCTGGACTGAGATCTGAGGACGAGGCCGACTACTATTGCGCCGCCTG |
| | GGATGCTTCTCTGAGCGGATGGGTTTTCGGCGGAGGCACCAAACTGACAGTGCTAG |
| | GCCAGCCTAAAGCCGCCCCTAGCGTGACCCTGTTCCCTCCAAGCAGCGAGGAACTG |
| | CAGGCCAACAAGGCCACCCTCGTGTGCCTGATCAGCGACTTCTATCCTGGCGCCGT |
| | GACCGTGGCCTGGAAGGCCGATAGCTCTCCTGTGAAGGCCGGCGTGGAAACCACC |
| | ACCCCTAGCAAGCAGAGCAACAACAAATACGCCGCCAGCAGCTACCTGAGCCTGA |
| | CCCCCGAGCAGTGGAAGTCCCACAGATCCTACAGCTGCCAAGTGACCCACGAGGG |
| | CAGCACCGTGGAAAAGACAGTGGCCCCTACCGAGTGCAGC |

1. An isolated polypeptide or conjugate thereof, wherein the isolated polypeptide comprises the tyrosine rich domain (TRD) of a seven transmembrane receptor, further characterized in that at least 25%, at least 50%, or at least 75% of the tyrosine residues of the TRD are sulfated.

2. The isolated polypeptide or conjugate according to claim 1, wherein the seven transmembrane receptor is human, cynomolgus and/or mouse.

3. The isolated polypeptide or conjugate according to claim 1, wherein the seven transmembrane receptor is a chemokine receptor, preferably
a. a CC chemokine receptor such as CCR1, CCR2, CCR3, CCR4, CCR5, CCR6, CCR7, CCR8, CCR9 or CCR10,
b. a CXC chemokine receptor such as CXCR1, CXCR2, CXCR3, CXCR4, CXCR5, or CXCR6, or
CX3CR1 or CXCR1.

4. The isolated polypeptide or conjugate according to claim 1, wherein the seven transmembrane receptor is CCR8.

5. The isolated polypeptide or conjugate according to claim 1, wherein the isolated polypeptide comprises the N terminus of the seven transmembrane receptor including a TRD and a LID domain, preferably wherein at least one cysteine between the TRD and the LID domain has been removed or has been altered into a different amino acid.

6. The isolated polypeptide or conjugate according to claim 1, wherein the polypeptide comprises a sequence according to or having at least 90% sequence identity with
a. SEQ ID NO:43, SEQ ID NO:44, SEQ ID NO:46 or SEQ ID NO:47, preferably wherein at least two or all of Y3, Y15 and Y17 have been sulfated, or
b. SEQ ID NO:45 or SEQ ID NO:48, preferably wherein at least two or all of Y3, Y14 and Y15 have been sulfated, or
c. SEQ ID NO:1, SEQ ID NO:4, SEQ ID NO:2, SEQ ID NO:5, SEQ ID NO:3 or SEQ ID NO:6, preferably wherein at least Y10 and/or Y18 have been sulfated, or
d. SEQ ID NO:7, SEQ ID NO:10, SEQ ID NO:8 or SEQ ID NO:11, preferably wherein at least Y26 has been sulfated, or
e. SEQ ID NO:9 or SEQ ID NO:12, preferably wherein at least Y37 and/or Y39 has been sulfated, or
f SEQ ID NO:13 or SEQ ID NO:16, preferably wherein Y16 and/or Y17 have been sulfated, or
g. SEQ ID NO:14 or SEQ ID NO:17, preferably wherein Y16 has been sulfated, or
h. SEQ ID NO:15 or SEQ ID NO:18 preferably wherein Y20 and/or Y22 has been sulfated, or
i. SEQ ID NO:19, SEQ ID NO:22, SEQ ID NO:20, SEQ ID NO:23, SEQ ID NO:21 or SEQ ID NO:24, preferably wherein at least Y22 has been sulfated and preferably furthermore Y16, Y19 and/or Y20 have been sulfated, or
j. SEQ ID NO:25, SEQ ID NO:28, SEQ ID NO:26 or SEQ ID NO:29, preferably wherein two, three or all of Y3, Y10, Y14 and Y15 have been sulfated, or
k. SEQ ID NO:27 or SEQ ID NO:30, preferably wherein two or three of Y10, Y12 and Y16 have been sulfated, or
l. SEQ ID NO:31 or SEQ ID NO:34, preferably wherein at least two or three of Y18, Y26 and Y27 have been sulfated, or
m. SEQ ID NO:32 or SEQ ID NO:35, preferably wherein at least two or three of Y23, Y31 and Y32 have been sulfated, or
n. SEQ ID NO:33 or SEQ ID NO:36, preferably wherein at least two or three of Y13, Y18 and Y19 have been sulfated, or
o. SEQ ID NO:37, SEQ ID NO:40, SEQ ID NO:38 or SEQ ID NO:41, preferably wherein one or both of Y8 and Y17 have been sulfated, or
p. SEQ ID NO:39 or SEQ ID NO:42, preferably wherein one or both of Y8 and Y17 and optionally Y20 have been sulfated, or
q. SEQ ID NO:61, SEQ ID NO:64, SEQ ID NO:62 or SEQ ID NO:65, preferably wherein at least Y28, and preferably also Y17 and/or Y37 has been sulfated, or
r. SEQ ID NO:63 or SEQ ID NO:66, preferably wherein at least Y28 has been sulfated, and preferably also Y19 has been sulfated, or
s. SEQ ID NO:67, SEQ ID NO:70, SEQ ID NO:68 or SEQ ID NO:71, preferably wherein at least one or both of Y14 and Y22 has been sulfated, or
t. SEQ ID NO:69 or SEQ ID NO:72, preferably wherein at least one, two or all of Y14, Y17 and Y22 have been sulfated, or
u. SEQ ID NO:73 or SEQ ID NO:76, preferably wherein Y27 has been sulfated, or
v. SEQ ID NO:74 or SEQ ID NO:77, preferably wherein at least one of Y14 and Y28 has been sulfated, or
w. SEQ ID NO:75 or SEQ ID NO:78, preferably wherein at least Y6 has been sulfated, or
x. SEQ ID NO:79 or SEQ ID NO:82, preferably wherein Y23 and/or Y25 have been sulfated, or
y. SEQ ID NO:80 or SEQ ID NO:83, preferably wherein Y20 and/or Y22 have been sulfated, or
z. SEQ ID NO:81 or SEQ ID NO:84, preferably wherein Y24 has been sulfated, or
aa. SEQ ID NO:85, SEQ ID NO:88, SEQ ID NO:86, SEQ ID NO:89, SEQ ID NO:87 or SEQ ID NO:90, preferably wherein at least one or both of Y27 and Y29 have been sulfated, or
bb. SEQ ID NO:91, SEQ ID NO:94, SEQ ID NO:92 or SEQ ID NO:95, preferably wherein at least Y12 and/or Y21 have been sulfated, or
cc. SEQ ID NO:93 or SEQ ID NO:96, preferably wherein at least Y23 and/or Y14 have been sulfated, or
dd. SEQ ID NO:97, SEQ ID NO:100, SEQ ID NO:98 or SEQ ID NO:101, preferably wherein at least one of Y3 and Y27 have been sulfated, or
ee. SEQ ID NO:99 or SEQ ID NO:102, preferably wherein at least Y3 and/or Y14 and/or Y20 and/or Y26 have been sulfated, or
ff. SEQ ID NO:103 or SEQ ID NO:106, preferably wherein at least one or both of Y6 and Y10 have been sulfated, or
gg. SEQ ID NO:104 or SEQ ID NO:107, preferably wherein at least two or all of Y4, Y7 and Y39 have been sulfated, or
hh. SEQ ID NO:105 or SEQ ID NO:108, preferably wherein at least one or both of Y11 and Y15 have been sulfated, or
ii. SEQ ID NO:157 or SEQ ID NO:160, preferably wherein at least Y14 has been sulfated, or
jj. SEQ ID NO:158, preferably wherein at least Y20 has been sulfated, or
kk. SEQ ID NO:161, preferably wherein at least Y20 or Y22 has been sulfated, or
ll. SEQ ID NO:159 or SEQ ID NO:162, preferably wherein at least Y15 has been sulfated, or
mm. SEQ ID NO:163 or SEQ ID NO:166, preferably wherein at least Y27 has been sulfated, or
nn. SEQ ID NO:164, preferably wherein at least Y14 has been sulfated or
oo. SEQ ID NO:167, preferably wherein at least Y14 or Y28 has been sulfated, or
pp. SEQ ID NO:165 or SEQ ID NO:168, preferably wherein at least Y6 has been sulfated.

7. The isolated polypeptide according to claim 1, wherein the isolated polypeptide is immobilized.

8. A method for production of the isolated polypeptide or conjugate according to claim 1, wherein the method comprises synthesis of the isolated polypeptide and sulfation of the respective tyrosine residues.

9. The use of the isolated polypeptide or conjugate according to claim 1
a. for antibody generation, preferably for the generation of a fully human antibody,
b. as antigen or for off-target panning, and/or
c. for characterization of an antibody.

10. A method for obtaining an antibody or binder, the method comprising the use of the isolated polypeptide or conjugate according to claim 1.

11. The method according to claim 10, furthermore comprising the use of at least one further isolated polypeptide or conjugate thereof, wherein the at least one further isolated polypeptide comprises a TRD
a. of a seven transmembrane receptor different from said first seven transmembrane receptor, or
b. of the first seven transmembrane receptor derived from a different species.

12. A method for obtaining an antibody or antibody fragment which specifically binds to a human and/or cynomolgus and/or murine CC or CXC chemokine receptor, the method comprising
a. synthetically sulfating a polypeptide comprising a tyrosine rich domain (TRD) and
b. selection of an antibody, antibody fragment or binder recognizing the sulfated polypeptide, and
c. optionally producing the antibody, antibody fragment or binder.

13. The method according to claim 8, wherein the antibody
a. comprises human derived CDRs, and/or
b. is a human, rat or murine IgG antibody, preferably a human IgG1 antibody or a murine IgG2a antibody, and/or
c. is cross reactive for two different seven transmembrane receptors, and/or
d. is cross reactive for a human and a cynomolgus seven transmembrane receptor, and/or
e. is characterized by a HCDR3 region comprising between 10 and 34% of tyrosine and/or between 2 and 20% of histidine, and/or
f. does not modulate G protein independent signaling of the chemokine receptor, and/or
g. is a non-internalizing antibody or is characterized by an internalization into a cell with endogenous target expression which is lower than the 1.5, 2, 3, 4, 5, 6, 7, or 10-fold of the internalization of the isotype control.

14. An isolated antibody, antigen-binding fragment thereof or binder obtained with a method according to claim 8.

The application's sequence listing, which the Patent Office published only in electronic form, follows.

SEQUENCE LISTING (965 sequences)

SEQ ID NO: 1 - protein, 23 aa, Artificial Sequence
  >sp|P32246|CCR1_HUMAN_TRD
METPNTTEDYDTTTEFDYGDATP

SEQ ID NO: 2 - protein, 23 aa, Artificial Sequence
  >sp|Q2Y2P0|CCR1_MACFA_TRD
METPDTTENYDMITEFDYGDATP

SEQ ID NO: 3 - protein, 23 aa, Artificial Sequence
  >sp|P51675|CCR1_MOUSE_TRD
MEISDFTEAYPTTTEFDYGDSTP

SEQ ID NO: 4 - protein, 34 aa, Artificial Sequence
  >sp|P32246|CCR1_HUMAN_N term
  misc_feature (24)..(24): Xaa can be any naturally occurring amino acid
METPNTTEDYDTTTEFDYGDATPXQKVNERAFGA

SEQ ID NO: 5 - protein, 34 aa, Artificial Sequence
  >sp|Q2Y2P0|CCR1_MACFA_N term
  misc_feature (24)..(24): Xaa can be any naturally occurring amino acid
METPDTTENYDMITEFDYGDATPXHKVNERAILA

SEQ ID NO: 6 - protein, 34 aa, Artificial Sequence
  >sp|P51675|CCR1_MOUSE_N term
  misc_feature (24)..(24): Xaa can be any naturally occurring amino acid
MEISDFTEAYPTTTEFDYGDSTPXQKTAVRAFGA

SEQ ID NO: 7 - protein, 31 aa, Artificial Sequence
  >sp|P41597|CCR2_HUMAN_TRD
MLSTSRSRFIRNTNESGEEVTTFFDYDYGAP

SEQ ID NO: 8 - protein, 31 aa, Artificial Sequence
  >sp|O18793|CCR2_MACMU_TRD
MLSTSRSRFIRNTNGSGEEVTTFFDYDYGAP

SEQ ID NO: 9 - protein, 44 aa, Artificial Sequence
  >sp|P51683|CCR2_MOUSE_TRD
MEDNNMLPQFIHGILSTSHSLFTRSIQELDEGATTPYDYDDGEP

SEQ ID NO: 10 - protein, 42 aa, Artificial Sequence
  >sp|P41597|CCR2_HUMAN_N term
  misc_feature (32)..(32): Xaa can be any naturally occurring amino acid
MLSTSRSRFIRNTNESGEEVTTFFDYDYGAPXHKFDVKQIGA

SEQ ID NO: 11 - protein, 42 aa, Artificial Sequence
  >sp|O18793|CCR2_MACMU_N term
  misc_feature (32)..(32): Xaa can be any naturally occurring amino acid
MLSTSRSRFIRNTNGSGEEVTTFFDYDYGAPXHKFDVKQIGA

SEQ ID NO: 12 - protein, 55 aa, Artificial Sequence
  >sp|P51683|CCR2_MOUSE_N term
  misc_feature (45)..(45): Xaa can be any naturally occurring amino acid
MEDNNMLPQFIHGILSTSHSLFTRSIQELDEGATTPYDYDDGEPXHKTSVKQIGA

SEQ ID NO: 13 - protein, 23 aa, Artificial Sequence
  >sp|P51677|CCR3_HUMAN_TRD
MTTSLDTVETFGTTSYYDDVGLL

SEQ ID NO: 14 - protein, 23 aa, Artificial Sequence
  >sp|Q9BDS8|CCR3_MACFA_TRD
MTTSLDTVETFGPTSYDDDMGLL

SEQ ID NO: 15 - protein, 27 aa, Artificial Sequence
  >sp|P51678|CCR3_MOUSE_TRD
MAFNTDEIKTVVESFETTPYEYEWAPP

SEQ ID NO: 16 - protein, 34 aa, Artificial Sequence
  >sp|P51677|CCR3_HUMAN_N term
  misc_feature (24)..(24): Xaa can be any naturally occurring amino acid
MTTSLDTVETFGTTSYYDDVGLLXEKADTRALMA

SEQ ID NO: 17 - protein, 34 aa, Artificial Sequence
  >sp|Q9BDS8|CCR3_MACFA_N term
  misc_feature (24)..(24): Xaa can be any naturally occurring amino acid
MTTSLDTVETFGPTSYDDDMGLLXEKADVGALIA

SEQ ID NO: 18 - protein, 38 aa, Artificial Sequence
  >sp|P51678|CCR3_MOUSE_N term
  misc_feature (28)..(28): Xaa can be any naturally occurring amino acid
MAFNTDEIKTVVESFETTPYEYEWAPPXEKVRIKELGS

SEQ ID NO: 19 - protein, 28 aa, Artificial Sequence
  >sp|P51679|CCR4_HUMAN_TRD
MNPTDIADTTLDESIYSNYYLYESIPKP

SEQ ID NO: 20 - protein, 28 aa, Artificial Sequence
  >tr|G7NYB7|CCR4_MACFA_TRD
MNPTDIADTTLDESIYSNYYLYESIPKP

SEQ ID NO: 21 - protein, 28 aa, Artificial Sequence
  >sp|P51680|CCR4_MOUSE_TRD
MNATEVTDTTQDETVYNSYYFYESMPKP

SEQ ID NO: 22 - protein, 39 aa, Artificial Sequence
  >sp|P51679|CCR4_HUMAN_N term
  misc_feature (29)..(29): Xaa can be any naturally occurring amino acid
MNPTDIADTTLDESIYSNYYLYESIPKPXTKEGIKAFGE

SEQ ID NO: 23 - protein, 39 aa, Artificial Sequence; identical to SEQ ID NO: 22
  >tr|G7NYB7|CCR4_MACFA_N term
  misc_feature (29)..(29): Xaa can be any naturally occurring amino acid

SEQ ID NO: 24 - protein, 39 aa, Artificial Sequence
  >sp|P51680|CCR4_MOUSE_N term
  misc_feature (29)..(29): Xaa can be any naturally occurring amino acid
MNATEVTDTTQDETVYNSYYFYESMPKPXTKEGIKAFGE

SEQ ID NO: 25 - protein, 19 aa, Artificial Sequence
  >sp|P51681|CCR5_HUMAN_TRD
MDYQVSSPIYDINYYTSEP

SEQ ID NO: 26 - protein, 19 aa, Artificial Sequence
  >sp|P61814|CCR5_MACFA_TRD
MDYQVSSPTYDIDYYTSEP

SEQ ID NO: 27 - protein, 21 aa, Artificial Sequence
  >sp|P51682|CCR5_MOUSE_TRD
MDFQGSVPTYSYDIDYGMSAP

SEQ ID NO: 28 - protein, 30 aa, Artificial Sequence
  >sp|P51681|CCR5_HUMAN_N term
  misc_feature (20)..(20): Xaa can be any naturally occurring amino acid
MDYQVSSPIYDINYYTSEPXQKINVKQIAA

SEQ ID NO: 29 - protein, 30 aa, Artificial Sequence
  >sp|P61814|CCR5_MACFA_N term
  misc_feature (20)..(20): Xaa can be any naturally occurring amino acid
MDYQVSSPTYDIDYYTSEPXQKINVKQIAA

SEQ ID NO: 30 - protein, 32 aa, Artificial Sequence
  >sp|P51682|CCR5_MOUSE_N term
  misc_feature (22)..(22): Xaa can be any naturally occurring amino acid
MDFQGSVPTYSYDIDYGMSAPXQKINVKQIAA

SEQ ID NO: 31 - protein, 35 aa, Artificial Sequence
  >sp|P51684|CCR6_HUMAN_TRD
MSGESMNFSDVFDSSEDYFVSVNTSYYSVDSEMLL

SEQ ID NO: 32 - protein, 40 aa, Artificial Sequence
  >tr|A0A2K5WY45|CCR6_MACFA_TRD
MFLPTMSGESMNFSDVFDSSEDYFASVNTSYYTVDSEMLL

SEQ ID NO: 33 - protein, 27 aa, Artificial Sequence
  >sp|O54689|CCR6_MOUSE_TRD
MNSTESYFGTDDYDNTEYYSIPPDHGP

SEQ ID NO: 34 - protein, 47 aa, Artificial Sequence
  >sp|P51684|CCR6_HUMAN_N term
  misc_feature (36)..(36): Xaa can be any naturally occurring amino acid
MSGESMNFSDVFDSSEDYFVSVNTSYYSVDSEMLLXSLQEVRQFSRL

SEQ ID NO: 35 - protein, 52 aa, Artificial Sequence
  >tr|A0A2K5WY45|CCR6_MACFA_N term
  misc_feature (41)..(41): Xaa can be any naturally occurring amino acid
MFLPTMSGESMNFSDVFDSSEDYFASVNTSYYTVDSEMLLXTLHEVRQFSRL

SEQ ID NO: 36 - protein, 39 aa, Artificial Sequence
  >sp|O54689|CCR6_MOUSE_N term
  misc_feature (28)..(28): Xaa can be any naturally occurring amino acid
MNSTESYFGTDDYDNTEYYSIPPDHGPXSLEEVRNFTKV

SEQ ID NO: 37 - protein, 23 aa, Artificial Sequence
  >sp|P32248|CCR7_HUMAN_TRD
QDEVTDDYIGDNTTVDYTLFESL

SEQ ID NO: 38 - protein, 23 aa, Artificial Sequence
  >tr|C0ISS3|CCR7_MACFA_TRD
QDEVTDDYIGDNTTVDYTLFESL

SEQ ID NO: 39 - protein, 23 aa, Artificial Sequence
  >sp|P47774|CCR7_MOUSE_TRD
QDEVTDDYIGENTTVDYTLYESV

SEQ ID NO: 40 - protein, 35 aa, Artificial Sequence
  >sp|P32248|CCR7_HUMAN_N term (w/o Signal Peptide))
  misc_feature (24)..(24): Xaa can be any naturally occurring amino acid
QDEVTDDYIGDNTTVDYTLFESLXSKKDVRNFKAW

SEQ ID NO: 41 - protein, 35 aa, Artificial Sequence; identical to SEQ ID NO: 40
  >tr|C0ISS3|CCR7_MACFA_N term (w/o  Signal Peptide))
  misc_feature (24)..(24): Xaa can be any naturally occurring amino acid

SEQ ID NO: 42 - protein, 35 aa, Artificial Sequence
  >sp|P47774|CCR7_MOUSE_N term (w/o  Signal Peptide))
  misc_feature (24)..(24): Xaa can be any naturally occurring amino acid
QDEVTDDYIGENTTVDYTLYESVXFKKDVRNFKAW

SEQ ID NO: 43 - protein, 24 aa, Artificial Sequence
  >sp|P51685|CCR8_HUMAN_TRD
MDYTLDLSVTTVTDYYYPDIFSSP

SEQ ID NO: 44 - protein, 24 aa, Artificial Sequence
  >sp|G7NYJ2|CCR8_MACFA_TRD
MDYTLDPSMTTMTDYYYPDSLSSP

SEQ ID NO: 45 - protein, 22 aa, Artificial Sequence
  >sp|P56484|CCR8_MOUSE_TRD
MDYTMEPNVTMTDYYPDFFTAP

SEQ ID NO: 46 - protein, 35 aa, Artificial Sequence
  >sp|P51685|CCR8_HUMAN_N term
  misc_feature (25)..(25): Xaa can be any naturally occurring amino acid
MDYTLDLSVTTVTDYYYPDIFSSPXDAELIQTNGK

SEQ ID NO: 47 - protein, 35 aa, Artificial Sequence
  >sp|G7NYJ2|CCR8_MACFA_N term
  misc_feature (25)..(25): Xaa can be any naturally occurring amino acid
MDYTLDPSMTTMTDYYYPDSLSSPXDGELIQRNDK

SEQ ID NO: 48 - protein, 33 aa, Artificial Sequence
  >sp|P56484|CCR8_MOUSE_N term
  misc_feature (23)..(23): Xaa can be any naturally occurring amino acid
MDYTMEPNVTMTDYYPDFFTAPXDAEFLLRGSM

SEQ ID NO: 49 - protein, 10 aa, Artificial Sequence
  >sp|P51685|CCR8_HUMAN_LID
DAELIQTNGK

SEQ ID NO: 50 - protein, 10 aa, Artificial Sequence
  >sp|G7NYJ2|CCR8_MACFA_LID
DGELIQRNDK

SEQ ID NO: 51 - protein, 10 aa, Artificial Sequence
  >sp|P56484|CCR8_MOUSE_LID
DAEFLLRGSM

SEQ ID NO: 52 - protein, 14 aa, Artificial Sequence
  >sp|P51685|CCR8_HUMAN_ECL1
YLLDQWVFGTVMCK

SEQ ID NO: 53 - protein, 14 aa, Artificial Sequence
  >sp|G7NYJ2|CCR8_MACFA_ECL1
YQLDQWVFGTVMCK

SEQ ID NO: 54 - protein, 14 aa, Artificial Sequence
  >sp|P56484|CCR8_MOUSE_ECL1
NLLDQWVFGTAMCK

SEQ ID NO: 55 - protein, 31 aa, Artificial Sequence
  >sp|P51685|CCR8_HUMAN_ECL2
YQVASEDGVLQCYSFYNQQTLKWKIFTNFKM

SEQ ID NO: 56 - protein, 31 aa, Artificial Sequence
  >sp|G7NYJ2|CCR8_MACFA_ECL2
YQVASEDGVLQCYSFYNQQTLKWKIFTNFEM

SEQ ID NO: 57 - protein, 31 aa, Artificial Sequence
  >sp|P56484|CCR8_MOUSE_ECL2
YQVASEDGMLQCFQFYEEQSLRWKLFTHFEI

SEQ ID NO: 58 - protein, 17 aa, Artificial Sequence
  >sp|P51685|CCR8_HUMAN_ECL3
HSMHILDGCSISQQLTY

SEQ ID NO: 59 - protein, 17 aa, Artificial Sequence
  >sp|G7NYJ2|CCR8_MACFA_ECL3
HSMHILDGCSISQQLNY

SEQ ID NO: 60 - protein, 17 aa, Artificial Sequence
  >sp|P56484|CCR8_MOUSE_ECL3
HDLHILDGCATRQRLAL

SEQ ID NO: 61 - protein, 37 aa, Artificial Sequence
  >sp|P51686|CCR9_HUMAN_TRD
MTPTDFTSPIPNMADDYGSESTSSMEDYVNFNFTDFY

SEQ ID NO: 62 - protein, 37 aa, Artificial Sequence
  >tr|Q0H741|CCR9_MACFA_TRD
MTPTEFTSPVPNMADDYGSESTSSMEDYVNFNFTDFY

SEQ ID NO: 63 - protein, 37 aa, Artificial Sequence; identical to SEQ ID NO: 62
  >sp|Q9WUT7|CCR9_MOUSE_TRD

SEQ ID NO: 64 - protein, 48 aa, Artificial Sequence
  >sp|P51686|CCR9_HUMAN_N term
  misc_feature (38)..(38): Xaa can be any naturally occurring amino acid
MTPTDFTSPIPNMADDYGSESTSSMEDYVNFNFTDFYXEKNNVRQFAS

SEQ ID NO: 65 - protein, 48 aa, Artificial Sequence
  >tr|Q0H741|CCR9_MACFA_N term
  misc_feature (38)..(38): Xaa can be any naturally occurring amino acid
MTPTEFTSPVPNMADDYGSESTSSMEDYVNFNFTDFYXEKNNVRQFAS

SEQ ID NO: 66 - protein, 48 aa, Artificial Sequence; identical to SEQ ID NO: 65
  >sp|Q9WUT7|CCR9_MOUSE_N term
  misc_feature (38)..(38): Xaa can be any naturally occurring amino acid

SEQ ID NO: 67 - protein, 30 aa, Artificial Sequence
  >sp|P46092|CCR10_HUMAN_TRD
MGTEATEQVSWGHYSGDEEDAYSAEPLPEL

SEQ ID NO: 68 - protein, 30 aa, Artificial Sequence
  >tr|A0A2K5UAP1|CCR10_MACFA_TRD
MGTEATEQVSWGHYSGDEEEAYSAEPLPEL

SEQ ID NO: 69 - protein, 30 aa, Artificial Sequence
  >sp|Q9JL21|CCR10_MOUSE_TRD
MGTKPTEQVSWGLYSGYDEEAYSVGPLPEL

SEQ ID NO: 70 - protein, 52 aa, Artificial Sequence
  >sp|P46092|CCR10_HUMAN_N term
  misc_feature (31)..(31): Xaa can be any naturally occurring amino acid
MGTEATEQVSWGHYSGDEEDAYSAEPLPELXYKADVQAFSRAFQPSVSLTVA

SEQ ID NO: 71 - protein, 52 aa, Artificial Sequence
  >tr|A0A2K5UAP1|CCR10_MACFA_N term
  misc_feature (31)..(31): Xaa can be any naturally occurring amino acid
MGTEATEQVSWGHYSGDEEEAYSAEPLPELXYKADVQAFSRAFQPSVSLTVA

SEQ ID NO: 72 - protein, 48 aa, Artificial Sequence
  >sp|Q9JL21|CCR10_MOUSE_N term
  misc_feature (31)..(31): Xaa can be any naturally occurring amino acid
MGTKPTEQVSWGLYSGYDEEAYSVGPLPELXYKADVQAFSRAFQPSVS

SEQ ID NO: 73 - protein, 29 aa, Artificial Sequence
  >sp|P25024|CXCR1_HUMAN_TRD
MSNITDPQMWDFDDLNFTGMPPADEDYSP

SEQ ID NO: 74 - protein, 30 aa, Artificial Sequence
  >tr|A0A2K5X9E4|CXCR1_MACFA_TRD
MSNATDPQMGDDDYDLNFTGMPPTDEDYSP

SEQ ID NO: 75 - protein, 35 aa, Artificial Sequence
  >sp|Q810W6|CXCR1_MOUSE_TRD
MAEAEYFIWTNPEGDFEKEFGNITGMLPTGDYFIP

SEQ ID NO: 76 - protein, 39 aa, Artificial Sequence
  >sp|P25024|CXCR1_HUMAN_N term
  misc_feature (30)..(30): Xaa can be any naturally occurring amino acid
MSNITDPQMWDFDDLNFTGMPPADEDYSPXMLETETLNK

SEQ ID NO: 77 - protein, 40 aa, Artificial Sequence
  >tr|A0A2K5X9E4|CXCR1_MACFA_N term
  misc_feature (31)..(31): Xaa can be any naturally occurring amino acid
MSNATDPQMGDDDYDLNFTGMPPTDEDYSPXRLETQSLNK

SEQ ID NO: 78 - protein, 44 aa, Artificial Sequence
  >sp|Q810W6|CXCR1_MOUSE_N term
  misc_feature (36)..(36): Xaa can be any naturally occurring amino acid
MAEAEYFIWTNPEGDFEKEFGNITGMLPTGDYFIPXKRVPITNR

SEQ ID NO: 79 - protein, 38 aa, Artificial Sequence
  >sp|P25025|CXCR2_HUMAN_TRD
MEDFNMESDSFEDFWKGEDLSNYSYSSTLPPFLLDAAP

SEQ ID NO: 80 - protein, 35 aa, Artificial Sequence
  >sp|Q28519|CXCR2_MACMU_TRD
FNMESDSFEDLWKGEDFSNYSYSSDLPPSLPDVAP

SEQ ID NO: 81 - protein, 37 aa, Artificial Sequence
  >sp|P35343|CXCR2_MOUSE_TRD
MGEFKVDKFNIEDFFSGDLDIFNYSSGMPSILPDAVP

SEQ ID NO: 82 - protein, 48 aa, Artificial Sequence
  >sp|P25025|CXCR2_HUMAN_N term
  misc_feature (39)..(39): Xaa can be any naturally occurring amino acid
MEDFNMESDSFEDFWKGEDLSNYSYSSTLPPFLLDAAPXEPESLEINK

SEQ ID NO: 83 - protein, 45 aa, Artificial Sequence
  >sp|Q28519|CXCR2_MACMU_N term
  misc_feature (36)..(36): Xaa can be any naturally occurring amino acid
FNMESDSFEDLWKGEDFSNYSYSSDLPPSLPDVAPXRPESLEINK

SEQ ID NO: 84 - protein, 47 aa, Artificial Sequence
  >sp|P35343|CXCR2_MOUSE_N term
  misc_feature (38)..(38): Xaa can be any naturally occurring amino acid
MGEFKVDKFNIEDFFSGDLDIFNYSSGMPSILPDAVPXHSENLEINS

SEQ ID NO: 85 - protein, 36 aa, Artificial Sequence
  >sp|P49682|CXCR3_HUMAN_TRD
MVLEVSDHQVLNDAEVAALLENFSSSYDYGENESDS

SEQ ID NO: 86 - protein, 36 aa, Artificial Sequence; identical to SEQ ID NO: 85
  >tr|A0A2K5UV19|CXCR3_MACFA_TRD

SEQ ID NO: 87 - protein, 41 aa, Artificial Sequence
  >sp|O88410|CXCR3_MOUSE_TRD
MYLEVSERQVLDASDFAFLLENSTSPYDYGENESDFSDSPP

SEQ ID NO: 88 - protein, 42 aa, Artificial Sequence
  >sp|P49682|CXCR3_HUMAN_N term
  misc_feature (37)..(38): Xaa can be any naturally occurring amino acid
MVLEVSDHQVLNDAEVAALLENFSSSYDYGENESDSXXTSPP

SEQ ID NO: 89 - protein, 42 aa, Artificial Sequence; identical to SEQ ID NO: 88
  >tr|A0A2K5UV19|CXCR3_MACFA_N term
  misc_feature (37)..(38): Xaa can be any naturally occurring amino acid

SEQ ID NO: 90 - protein, 52 aa, Artificial Sequence
  >sp|O88410|CXCR3_MOUSE_N term
  misc_feature (42)..(42): Xaa can be any naturally occurring amino acid
MYLEVSERQVLDASDFAFLLENSTSPYDYGENESDFSDSPPXPQDFSLNFDR

SEQ ID NO: 91 - protein, 27 aa, Artificial Sequence
  >sp|P61073|CXCR4_HUMAN_TRD
MEGISIYTSDNYTEEMGSGDYDSMKEP

SEQ ID NO: 92 - protein, 27 aa, Artificial Sequence
  >sp|Q28474|CXCR4_MACFA_TRD
MEGISIYTSDNYTEEMGSGDYDSIKEP

SEQ ID NO: 93 - protein, 29 aa, Artificial Sequence
  >sp|P70658|CXCR4_MOUSE_TRD
MEPISVSIYTSDNYSEEVGSGDYDSNKEP

SEQ ID NO: 94 - protein, 38 aa, Artificial Sequence
  >sp|P61073|CXCR4_HUMAN_N term
  misc_feature (28)..(28): Xaa can be any naturally occurring amino acid
MEGISIYTSDNYTEEMGSGDYDSMKEPXFREENANFNK

SEQ ID NO: 95 - protein, 38 aa, Artificial Sequence
  >sp|Q28474|CXCR4_MACFA_N term
  misc_feature (28)..(28): Xaa can be any naturally occurring amino acid
MEGISIYTSDNYTEEMGSGDYDSIKEPXFREENAHFNR

SEQ ID NO: 96 - protein, 40 aa, Artificial Sequence
  >sp|P70658|CXCR4_MOUSE_N term
  misc_feature (30)..(30): Xaa can be any naturally occurring amino acid
MEPISVSIYTSDNYSEEVGSGDYDSNKEPXFRDENVHFNR

SEQ ID NO: 97 - protein, 37 aa, Artificial Sequence
  >sp|P32302|CXCR5_HUMAN_TRD
MNYPLTLEMDLENLEDLFWELDRLDNYNDTSLVENHL

SEQ ID NO: 98 - protein, 37 aa, Artificial Sequence
  >tr|G8F5K4|CXCR5_MACFA_TRD
MNYPLMLEMDLENLEDLFLEFDKFDNYNDTSLVENHL

SEQ ID NO: 99 - protein, 39 aa, Artificial Sequence
  >sp|Q04683|CXCR5_MOUSE_TRD
MNYPLTLDMGSITYNMDDLYKELAFYSNSTEIPLQDSNF

SEQ ID NO: 100 - protein, 55 aa, Artificial Sequence
  >sp|P32302|CXCR5_HUMAN_N term
  misc_feature (38)..(38): Xaa can be any naturally occurring amino acid
MNYPLTLEMDLENLEDLFWELDRLDNYNDTSLVENHLXPATEGPLMASFKAVFVP

SEQ ID NO: 101 - protein, 55 aa, Artificial Sequence
  >tr|G8F5K4|CXCR5_MACFA_N term
  misc_feature (38)..(38): Xaa can be any naturally occurring amino acid
MNYPLMLEMDLENLEDLFLEFDKFDNYNDTSLVENHLXPATEGPLMASFKAVFVP

SEQ ID NO: 102 - protein, 57 aa, Artificial Sequence
  >sp|Q04683|CXCR5_MOUSE_N term
  misc_feature (40)..(40): Xaa can be any naturally occurring amino acid
MNYPLTLDMGSITYNMDDLYKELAFYSNSTEIPLQDSNFXSTVEGPLLTSFKAVFMP

SEQ ID NO: 103 - protein, 32 aa, Artificial Sequence
  >sp|O00574|CXCR6_HUMAN_TRD
MAEHDYHEDYGFSSFNDSSQEEHQDFLQFSKV

SEQ ID NO: 104 - protein, 33 aa, Artificial Sequence
  >sp|Q9BDS6|CXCR6_MACFA_TRD
MAEYDHYEDDGFLNSFNDSSQEEHQDFLQFRKV

SEQ ID NO: 105 - protein, 41 aa, Artificial Sequence
  >sp|Q9EQ16|CXCR6_MOUSE_TRD
MDDGHQESALYDGHYEGDFWLFNNSSDNSQENKRFLKFKEV

SEQ ID NO: 106 - protein, 43 aa, Artificial Sequence
  >sp|O00574|CXCR6_HUMAN_N term
  misc_feature (36)..(36): Xaa can be any naturally occurring amino acid
MAEHDYHEDYGFSSFNDSSQEEHQDFLQFSKVFLPXMYLVVFV

SEQ ID NO: 107 - protein, 44 aa, Artificial Sequence
  >sp|Q9BDS6|CXCR6_MACFA_N term
  misc_feature (37)..(37): Xaa can be any naturally occurring amino acid
MAEYDHYEDDGFLNSFNDSSQEEHQDFLQFRKVFLPXMYLVVFV

SEQ ID NO: 108 - protein, 45 aa, Artificial Sequence
  >sp|Q9EQ16|CXCR6_MOUSE_N term
  misc_feature (45)..(45): Xaa can be any naturally occurring amino acid
MDDGHQESALYDGHYEGDFWLFNNSSDNSQENKRFLKFKEVFLPX

SEQ ID NO: 109 - protein, 355 aa, Artificial Sequence
  >sp|P32246|CCR1_HUMAN
METPNTTEDYDTTTEFDYGDATPCQKVNERAFGAQLLPPLYSLVFVIGLVGNILVVLVLVQYKRLKNMTSIYLLNLAISDLLFLFTLPFWIDYKLKDDWVFGDAMCKILSGFYYTGLYSEIFFIILLTIDRYLAIVHAVFALRARTVTFGVITSIIIWALAILASMPGLYFSKTQWEFTHHTCSLHFPHESLREWKLFQALKLNLFGLVLPLLVMIICYTGIIKILLRRPNEKKSKAVRLIFVIMIIFFLFWTPYNLTILISVFQDFLFTHECEQSRHLDLAVQVTEVIAYTHCCVNPVIYAFVGERFRKYLRQLFHRRVAVHLVKWLPFLSVDRLERVSSTSPSTGEHELSAGF

SEQ ID NO: 110 - protein, 355 aa, Artificial Sequence
  >sp|Q2Y2P0|CCR1_MACFA
METPDTTENYDMITEFDYGDATPCHKVNERAILAQLLPPLYSLVFVIGVVGNLLVVLVLVQYKRLKNMTNIYLLNLAISDLLFLFTLPFLIYYKSTDDWIFGDAMCKILSGFYYTGLYSEIFFIILLTIDRYLAIVHAVFALRARTVTFGVITSIIIWALAILASSPLMYFSKTQWNIVRHSCNLHFPYESFQQWKLFQALKLNLFGLVLPLLVMIVCYTGIIKILLRRPNEKKSKAVRLIFVIMIIFFLFWTPYNLTELISVFQEFLFTHLCEQNRQLDLAMEVTEVIANMHCCVNPVIYAFAGERFRKYLRQLFHRRVAVHLVKWLPFLSGDRLERVSSTSPSTGEHELSAGL

SEQ ID NO: 111 - protein, 355 aa, Artificial Sequence
  >sp|P51675|CCR1_MOUSE
MEISDFTEAYPTTTEFDYGDSTPCQKTAVRAFGAGLLPPLYSLVFIIGVVGNVLVILVLMQHRRLQSMTSIYLFNLAVSDLVFLFTLPFWIDYKLKDDWIFGDAMCKLLSGFYYLGLYSEIFFIILLTIDRYLAIVHAVFALRARTVTFGIITSIITWALAILASMPALYFFKAQWEFTHRTCSPHFPYKSLKQWKRFQALKLNLLGLILPLLVMIICYAGIIRILLRRPSEKKVKAVRLIFAITLLFFLLWTPYNLSVFVSAFQDVLFTNQCEQSKQLDLAMQVTEVIAYTHCCVNPIIYVFVGERFWKYLRQLFQRHVAIPLAKWLPFLSVDQLERTSSISPSTGEHELSAGF

SEQ ID NO: 112 - protein, 374 aa, Artificial Sequence
  >sp|P41597|CCR2_HUMAN
MLSTSRSRFIRNTNESGEEVTTFFDYDYGAPCHKFDVKQIGAQLLPPLYSLVFIFGFVGNMLVVLILINCKKLKCLTDIYLLNLAISDLLFLITLPLWAHSAANEWVFGNAMCKLFTGLYHIGYFGGIFFIILLTIDRYLAIVHAVFALKARTVTFGVVTSVITWLVAVFASVPGIIFTKCQKEDSVYVCGPYFPRGWNNFHTIMRNILGLVLPLLIMVICYSGILKTLLRCRNEKKRHRAVRVIFTIMIVYFLFWTPYNIVILLNTFQEFFGLSNCESTSQLDQATQVTETLGMTHCCINPIIYAFVGEKFRSLFHIALGCRIAPLQKPVCGGPGVRPGKNVKVTTQGLLDGRGKGKSIGRAPEASLQDKEGA

SEQ ID NO: 113 - protein, 360 aa, Artificial Sequence
  >sp|O18793|CCR2_MACMU
MLSTSRSRFIRNTNGSGEEVTTFFDYDYGAPCHKFDVKQIGAQLLPPLYSLVFIFGFVGNMLVVLILINCKKLKSLTDIYLLNLAISDLLFLITLPLWAHSAANEWVFGNAMCKLFTGLYHIGYLGGIFFIILLTIDRYLAIVHAVFALKARTVTFGVVTSVITWLVAVFASVPGIIFTKCQEEDSVYICGPYFPRGWNNFHTIMRNILGLVLPLLIMVICYSGILKTLLRCRNEKKRHRAVRLIFTIMIVYFLFWTPYNIVILLNTFQEFFGLSNCESTRQLDQATQVTETLGMTHCCINPIIYAFVGEKFRRYLSMFFRKYITKRFCKQCPVFYRETVDGVTSTNTPSTAEQEVSVGL

SEQ ID NO: 114 - protein, 373 aa, Artificial Sequence
  >sp|P51683|CCR2_MOUSE
MEDNNMLPQFIHGILSTSHSLFTRSIQELDEGATTPYDYDDGEPCHKTSVKQIGAWILPPLYSLVFIFGFVGNMLVIIILIGCKKLKSMTDIYLLNLAISDLLFLLTLPFWAHYAANEWVFGNIMCKVFTGLYHIGYFGGIFFIILLTIDRYLAIVHAVFALKARTVTFGVITSVVTWVVAVFASLPGIIFTKSKQDDHHYTCGPYFTQLWKNFQTIMRNILSLILPLLVMVICYSGILHTLFRCRNEKKRHRAVRLIFAIMIVYFLFWTPYNIVLFLTTFQESLGMSNCVIDKHLDQAMQVTETLGMTHCCINPVIYAFVGEKFRRYLSIFFRKHIAKRLCKQCPVFYRETADRVSSTFTPSTGEQEVSVGL

SEQ ID NO: 115 - protein, 355 aa, Artificial Sequence
  >sp|P51677|CCR3_HUMAN
MTTSLDTVETFGTTSYYDDVGLLCEKADTRALMAQFVPPLYSLVFTVGLLGNVVVVMILIKYRRLRIMTNIYLLNLAISDLLFLVTLPFWIHYVRGHNWVFGHGMCKLLSGFYHTGLYSEIFFIILLTIDRYLAIVHAVFALRARTVTFGVITSIVTWGLAVLAALPEFIFYETEELFEETLCSALYPEDTVYSWRHFHTLRMTIFCLVLPLLVMAICYTGIIKTLLRCPSKKKYKAIRLIFVIMAVFFIFWTPYNVAILLSSYQSILFGNDCERSKHLDLVMLVTEVIAYSHCCMNPVIYAFVGERFRKYLRHFFHRHLLMHLGRYIPFLPSEKLERTSSVSPSTAEPELSIVF

SEQ ID NO: 116 - protein, 355 aa, Artificial Sequence
  >sp|Q9BDS8|CCR3_MACFA
MTTSLDTVETFGPTSYDDDMGLLCEKADVGALIAQFVPPLYSLVFMVGLLGNVVVVMILIKYRRLRIMTNIYLLNLAISDLLFLFTLPFWIHYVRERNWVFSHGMCKVLSGFYHTGLYSEIFFIILLTIDRYLAIVHAVFALRARTVTFGVVTSIVTWGLAVLAALPEFIFYGTEELFPETLCSAIYPQDTVYSWRHFHTLRMTILCLALPLLVMAICYTGIIKTLLRCPSKKKYKAIRLIFVIMAVFFIFWTPYNVAILISTYQSILFGPDCERSKHLDLFVLVTEVIAYSHCWVNPVIYAFVGERFRKYLRHFFHRHVLMHPGKYIPFLPSEKLERTSSVSPSTAEPELSIVF

SEQ ID NO: 117 - protein, 359 aa, Artificial Sequence
  >sp|P51678|CCR3_MOUSE
MAFNTDEIKTVVESFETTPYEYEWAPPCEKVRIKELGSWLLPPLYSLVFIIGLLGNMMVVLILIKYRKLQIMTNIYLFNLAISDLLFLFTVPFWIHYVLWNEWGFGHYMCKMLSGFYYLALYSEIFFIILLTIDRYLAIVHAVFALRARTVTFATITSIITWGLAGLAALPEFIFHESQDSFGEFSCSPRYPEGEEDSWKRFHALRMNIFGLALPLLIMVICYSGIIKTLLRCPNKKKHKAIRLIFVVMIVFFIFWTPYNLVLLFSAFHSTFLETSCQQSKHLDLAMQVTEVIAYTHCCINPVIYAFVGERFRKHLRLFFHRNVAVYLGKYIPFLPGEKMERTSSVSPSTGEQEISVVF

SEQ ID NO: 118 - protein, 360 aa, Artificial Sequence
  >sp|P51679|CCR4_HUMAN
MNPTDIADTTLDESIYSNYYLYESIPKPCTKEGIKAFGELFLPPLYSLVFVFGLLGNSVVVLVLFKYKRLRSMTDVYLLNLAISDLLFVFSLPFWGYYAADQWVFGLGLCKMISWMYLVGFYSGIFFVMLMSIDRYLAIVHAVFSLRARTLTYGVITSLATWSVAVFASLPGFLFSTCYTERNHTYCKTKYSLNSTTWKVLSSLEINILGLVIPLGIMLFCYSMIIRTLQHCKNEKKNKAVKMIFAVVVLFLGFWTPYNIVLFLETLVELEVLQDCTFERYLDYAIQATETLAFVHCCLNPIIYFFLGEKFRKYILQLFKTCRGLFVLCQYCGLLQIYSADTPSSSYTQSTMDHDLHDAL

SEQ ID NO: 119 - protein, 360 aa, Artificial Sequence
  >tr|G7NYB7|CCR4_MACFA
MNPTDIADTTLDESIYSNYYLYESIPKPCTKEGIKAFGELFLPPLYSLVFVFGLLGNSVVVLVLFKYKRLRSMTDVYLLNLAISDLLFVFSLPFWGYYAADQWVFGLGLCKMISWIYLVGFYSGIFFVMLMSIDRYLAIVHAVFSLRARTLTYGVITSLATWSVAVFASLPGFLFSTCYTERNHTYCKTKYSLNSTTWKVISSLEINILGLVIPFGIMLFCYSMIIRTLQHCKNEKKNKAVKMIFAVVVLFLGFWTPYNIVLFLETLVDLEVLQDCTFERYLDYAIQATETLAFVHCCLNPIIYFFLGEKFRKYILQLFKTCRGLFVLCQYCGFLQIYSADTPSSSYTQSTMDHDLHDAL

SEQ ID NO: 120 - protein, 360 aa, Artificial Sequence
  >sp|P51680|CCR4_MOUSE
MNATEVTDTTQDETVYNSYYFYESMPKPCTKEGIKAFGEVFLPPLYSLVFLLGLFGNSVVVLVLFKYKRLKSMTDVYLLNLAISDLLFVLSLPFWGYYAADQWVFGLGLCKIVSWMYLVGFYSGIFFIMLMSIDRYLAIVHAVFSLKARTLTYGVITSLITWSVAVFASLPGLLFSTCYTEHNHTYCKTQYSVNSTTWKVLSSLEINVLGLLIPLGIMLFCYSMIIRTLQHCKNEKKNRAVRMIFAVVVLFLGFWTPYNVVLFLETLVELEVLQDCTLERYLDYAIQATETLAFIHCCLNPVIYFFLGEKFRKYITQLFRTCRGPLVLCKHCDFLQVYSADMSSSSYTQSTVDHDFRDAL

SEQ ID NO: 121 - protein, 352 aa, Artificial Sequence [sequence omitted]

SEQ ID NO: 122 - protein, 352 aa, Artificial Sequence
  >sp|P61814|CCR5_MACFA
MDYQVSSPTYDIDYYTSEPCQKINVKQIAARLLPPLYSLVFIFGFVGNILVVLILINCKRLKSMTDIYLLNLAISDLLFLLTVPFWAHYAAAQWDFGNTMCQLLTGLYFIGFFSGIFFIILLTIDRYLAIVHAVFALKARTVTFGVVTSVITWVVAVFASLPGIIFTRSQREGLHYTCSSHFPYSQYQFWKNFQTLKMVILGLVLPLLVMVICYSGILKTLLRCRNEKKRHRAVRLIFTIMIVYFLFWAPYNIVLLLNTFQEFFGLNNCSSSNRLDQAMQVTETLGMTHCCINPIIYAFVGEKFRNYLLVFFQKHIAKRFCKCCSIFQQEAPERASSVYTRSTGEQEISVGL

SEQ ID NO: 123 - protein, 354 aa, Artificial Sequence
  >sp|P51682|CCR5_MOUSE
MDFQGSVPTYSYDIDYGMSAPCQKINVKQIAAQLLPPLYSLVFIFGFVGNMMVFLILISCKKLKSVTDIYLLNLAISDLLFLLTLPFWAHYAANEWVFGNIMCKVFTGLYHIGYFGGIFFIILLTIDRYLAIVHAVFALKVRTVNFGVITSVVTWAVAVFASLPEIIFTRSQKEGFHYTCSPHFPHTQYHFWKSFQTLKMVILSLILPLLVMVICYSGILHTLFRCRNEKKRHRAVRLIFAIMIVYFLFWTPYNIVLLLTTFQEFFGLNNCSSSNRLDQAMQATETLGMTHCCLNPVIYAFVGEKFRSYLSVFFRKHMVKRFCKRCSIFQQDNPDRASSVYTRSTGEHEVSTGL

SEQ ID NO: 124 - protein, 374 aa, Artificial Sequence
  >sp|P51684|CCR6_HUMAN
MSGESMNFSDVFDSSEDYFVSVNTSYYSVDSEMLLCSLQEVRQFSRLFVPIAYSLICVFGLLGNILVVITFAFYKKARSMTDVYLLNMAIADILFVLTLPFWAVSHATGAWVFSNATCKLLKGIYAINFNCGMLLLTCISMDRYIAIVQATKSFRLRSRTLPRSKIICLVVWGLSVIISSSTFVFNQKYNTQGSDVCEPKYQTVSEPIRWKLLMLGLELLFGFFIPLMFMIFCYTFIVKTLVQAQNSKRHKAIRVIIAVVLVFLACQIPHNMVLLVTAANLGKMNRSCQSEKLIGYTKTVTEVLAFLHCCLNPVLYAFIGQKFRNYFLKILKDLWCVRRKYKSSGFSCAGRYSENISRQTSETADNDNASSFTM

SEQ ID NO: 125 - protein, 379 aa, Artificial Sequence
  >tr|A0A2K5WY45|CCR6_MACFA
MFLPTMSGESMNFSDVFDSSEDYFASVNTSYYTVDSEMLLCTLHEVRQFSRLFVPIAYSLICVFGLLGNILVVITFAFYKKARSMTDVYLLNMAIADILFVLTLPFWAVSHATGAWVFSNAMCKLMKGIYAINFNCGMLLLTCISMDRYIAIVQATKSFRLRYRTLLRSKVICLIVWGVSVIISSSTFIFNQKYNIQGSDVCEPKYQTVSEPIKWKLLMLGLELLFGFFIPLMFMIFCYMFIVKTLVQAQNSKRHKAIRVIIAVVLVFLACQIPHNMVLLVTAANLGNMNRSCHSEKLLGYTKTVTEVLAFLHCCLNPVLYAFIGQKFRNYFLKIMKDLWCVRRKYKSSGFSCAGRYSENISRQTSETADNDNASSFTM

SEQ ID NO: 126 - protein, 367 aa, Artificial Sequence
  >sp|O54689|CCR6_MOUSE
MNSTESYFGTDDYDNTEYYSIPPDHGPCSLEEVRNFTKVFVPIAYSLICVFGLLGNIMVVMTFAFYKKARSMTDVYLLNMAITDILFVLTLPFWAVTHATNTWVFSDALCKLMKGTYAVNFNCGMLLLACISMDRYIAIVQATKSFRVRSRTLTHSKVICVAVWFISIIISSPTFIFNKKYELQDRDVCEPRYRSVSEPITWKLLGMGLELFFGFFTPLLFMVFCYLFIIKTLVQAQNSKRHRAIRVVIAVVLVFLACQIPHNMVLLVTAVNTGKVGRSCSTEKVLAYTRNVAEVLAFLHCCLNPVLYAFIGQKFRNYFMKIMKDVWCMRRKNKMPGFLCARVYSESYISRQTSETVENDNASSFTM

SEQ ID NO: 127 - protein, 378 aa, Artificial Sequence
  >sp|P32248|CCR7_HUMAN
MDLGKPMKSVLVVALLVIFQVCLCQDEVTDDYIGDNTTVDYTLFESLCSKKDVRNFKAWFLPIMYSIICFVGLLGNGLVVLTYIYFKRLKTMTDTYLLNLAVADILFLLTLPFWAYSAAKSWVFGVHFCKLIFAIYKMSFFSGMLLLLCISIDRYVAIVQAVSAHRHRARVLLISKLSCVGIWILATVLSIPELLYSDLQRSSSEQAMRCSLITEHVEAFITIQVAQMVIGFLVPLLAMSFCYLVIIRTLLQARNFERNKAIKVIIAVVVVFIVFQLPYNGVVLAQTVANFNITSSTCELSKQLNIAYDVTYSLACVRCCVNPFLYAFIGVKFRNDLFKLFKDLGCLSQEQLRQWSSCRHIRRSSMSVEAETTTTFSP

SEQ ID NO: 128 - protein, 378 aa, Artificial Sequence
  >tr|C0ISS3|CCR7_MACFA
MDLGKPMKSVLVVALLVIFQVCLCQDEVTDDYIGDNTTVDYTLFESLCSKKDVRNFKAWFLPIMYSIICFVGLLGNGLVVLTYIYFKRLKTMTDTYLLNLAVADILFLLTLPFWAYSAAKSWVFGVHFCKLIFAIYKMSFFSGMLLLLCISIDRYVAIVQAVSAHRHRARVLLISKLSCVGIWILATVLSIPELLYSGLQRSSSEQAMRCSLITEHVEAFITIQVAQMVIGFLVPLLAMSFCYLVIIRTLLQARNFERNKAIKVIIAVVVVFIVFQLPYNGVVLAQTVANFNITSSTCELSKQLNIAYDVTYSLACVRCCVNPFLYAFIGVKFRNDLFKLFKDLGCLSQEQLRQWSSCRHIRRSSMSVEAETTTTFSP

SEQ ID NO: 129 - protein, 378 aa, Artificial Sequence
  >sp|P47774|CCR7_MOUSE
MDPGKPRKNVLVVALLVIFQVCFCQDEVTDDYIGENTTVDYTLYESVCFKKDVRNFKAWFLPLMYSVICFVGLLGNGLVILTYIYFKRLKTMTDTYLLNLAVADILFLLILPFWAYSEAKSWIFGVYLCKGIFGIYKLSFFSGMLLLLCISIDRYVAIVQAVSAHRHRARVLLISKLSCVGIWMLALFLSIPELLYSGLQKNSGEDTLRCSLVSAQVEALITIQVAQMVFGFLVPMLAMSFCYLIIIRTLLQARNFERNKAIKVIIAVVVVFIVFQLPYNGVVLAQTVANFNITNSSCETSKQLNIAYDVTYSLASVRCCVNPFLYAFIGVKFRSDLFKLFKDLGCLSQERLRHWSSCRHVRNASVSMEAETTTTFSP

SEQ ID NO: 130 - protein, 355 aa, Artificial Sequence
  >sp|P51685|CCR8_HUMAN
MDYTLDLSVTTVTDYYYPDIFSSPCDAELIQTNGKLLLAVFYCLLFVFSLLGNSLVILVLVVCKKLRSITDVYLLNLALSDLLFVFSFPFQTYYLLDQWVFGTVMCKVVSGFYYIGFYSSMFFITLMSVDRYLAVVHAVYALKVRTIRMGTTLCLAVWLTAIMATIPLLVFYQVASEDGVLQCYSFYNQQTLKWKIFTNFKMNILGLLIPFTIFMFCYIKILHQLKRCQNHNKTKAIRLVLIVVIASLLFWVPFNVVLFLTSLHSMHILDGCSISQQLTYATHVTEIISFTHCCVNPVIYAFVGEKFKKHLSEIFQKSCSQIFNYLGRQMPRESCEKSSSCQQHSSRSSSVDYIL

SEQ ID NO: 131 - protein, 355 aa, Artificial Sequence
  >sp|G7NYJ2|CCR8_MACFA
MDYTLDPSMTTMTDYYYPDSLSSPCDGELIQRNDKLLLAVFYCLLFVFSLLGNSLVILVLVVCKKLRNITDIYLLNLALSDLLFVFSFPFQTYYQLDQWVFGTVMCKVVSGFYYIGFYSSMFFITLMSVDRYLAVVHAVYAIKVRTIRMGTTLSLVVWLTAIMATIPLLVFYQVASEDGVLQCYSFYNQQTLKWKIFTNFEMNILGLLIPFTIFMFCYIKILHQLKRCQNHNKTKAIRLVLIVVIASLLFWVPFNVVLFLTSLHSMHILDGCSISQQLNYATHVTEIISFTHCCVNPVIYAFVGEKFKKHLSEIFQKSCSHIFIYLGRQMPRESCEKSSSCQQHSFRSSSIDYIL

SEQ ID NO: 132 - protein, 353 aa, Artificial Sequence
  >sp|P56484|CCR8_MOUSE
MDYTMEPNVTMTDYYPDFFTAPCDAEFLLRGSMLYLAILYCVLFVLGLLGNSLVILVLVGCKKLRSITDIYLLNLAASDLLFVLSIPFQTHNLLDQWVFGTAMCKVVSGLYYIGFFSSMFFITLMSVDRYLAIVHAVYAIKVRTASVGTALSLTVWLAAVTATIPLMVFYQVASEDGMLQCFQFYEEQSLRWKLFTHFEINALGLLLPFAILLFCYVRILQQLRGCLNHNRTRAIKLVLTVVIVSLLFWVPFNVALFLTSLHDLHILDGCATRQRLALAIHVTEVISFTHCCVNPVIYAFIGEKFKKHLMDVFQKSCSHIFLYLGRQMPVGALERQLSSNQRSSHSSTLDDIL

SEQ ID NO: 133 - protein, 369 aa, Artificial Sequence
  >sp|P51686|CCR9_HUMAN
MTPTDFTSPIPNMADDYGSESTSSMEDYVNFNFTDFYCEKNNVRQFASHFLPPLYWLVFIVGALGNSLVILVYWYCTRVKTMTDMFLLNLAIADLLFLVTLPFWAIAAADQWKFQTFMCKVVNSMYKMNFYSCVLLIMCISVDRYIAIAQAMRAHTWREKRLLYSKMVCFTIWVLAAALCIPEILYSQIKEESGIAICTMVYPSDESTKLKSAVLTLKVILGFFLPFVVMACCYTIIIHTLIQAKKSSKHKALKVTITVLTVFVLSQFPYNCILLVQTIDAYAMFISNCAVSTNIDICFQVTQTIAFFHSCLNPVLYVFVGERFRRDLVKTLKNLGCISQAQWVSFTRREGSLKLSSMLLETTSGALSL

SEQ ID NO: 134 - protein, 369 aa, Artificial Sequence
  >tr|Q0H741|CCR9_MACFA
MTPTEFTSPVPNMADDYGSESTSSMEDYVNFNFTDFYCEKNNVRQFASHFLPPLYWLVFIVGALGNSLVILVYWYCTRVKTMTDMFLLNLAIADLLFLVTLPFWAIAAADQWKFQTFMCKVVNSMYKMNFYSCVLLIMCISVDRYIAIAQAMRAHTWREKRLLYSKMVCFTIWVLAAALCIPEILYSQIKEESGIAVCTMVYPSDESTKLKSAVLTLKVILGFFLPFMVMACCYTIIIHTLIQAKKSSKHKALKVTITVLTVFVLSQFPYNCILLVQTIDAYAMFISSCAVSTNIDICFQVTQTIAFFHSCLNPVLYVFVGERFRRDLVKTLKNLGCISQAQWVSFTRREGSLKLSSMLLETTSGALSL

SEQ ID NO: 135 - protein, 369 aa, Artificial Sequence
  >sp|Q9WUT7|CCR9_MOUSE
MMPTELTSLIPGMFDDFSYDSTASTDDYMNLNFSSFFCKKNNVRQFASHFLPPLYWLVFIVGTLGNSLVILVYWYCTRVKTMTDMFLLNLAIADLLFLATLPFWAIAAAGQWMFQTFMCKVVNSMYKMNFYSCVLLIMCISVDRYIAIVQAMKAQVWRQKRLLYSKMVCITIWVMAAVLCTPEILYSQVSGESGIATCTMVYPKDKNAKLKSAVLILKVTLGFFLPFMVMAFCYTIIIHTLVQAKKSSKHKALKVTITVLTVFIMSQFPYNSILVVQAVDAYAMFISNCTISTNIDICFQVTQTIAFFHSCLNPVLYVFVGERFRRDLVKTLKNLGCISQAQWVSFTRREGSLKLSSMLLETTSGALSL

SEQ ID NO: 136 - protein, 362 aa, Artificial Sequence
  >sp|P46092|CCR10_HUMAN
MGTEATEQVSWGHYSGDEEDAYSAEPLPELCYKADVQAFSRAFQPSVSLTVAALGLAGNGLVLATHLAARRAARSPTSAHLLQLALADLLLALTLPFAAAGALQGWSLGSATCRTISGLYSASFHAGFLFLACISADRYVAIARALPAGPRPSTPGRAHLVSVIVWLLSLLLALPALLFSQDGQREGQRRCRLIFPEGLTQTVKGASAVAQVALGFALPLGVMVACYALLGRTLLAARGPERRRALRVVVALVAAFVVLQLPYSLALLLDTADLLAARERSCPASKRKDVALLVTSGLALARCGLNPVLYAFLGLRFRQDLRRLLRGGSCPSGPQPRRGCPRRPRLSSCSAPTETHSLSWDN

SEQ ID NO: 137 - protein, 362 aa, Artificial Sequence
  >tr|A0A2K5UAP1|CCR10_MACFA
MGTEATEQVSWGHYSGDEEEAYSAEPLPELCYKADVQAFSRAFQPSVSLTVAALGLAGNGLVLATHLAARRAARSPTSAHLLQLALADLLLALTLPFAAAGALQGWSLGSATCRTISGLYSASFHAGFLFLACISADRYVAIARALPAGPRPSTPGRAHLVSVIVWLLSLLLALPALLFSRDGQREGQRRCRLIFPEGLTQTVKGASAVAQVALGFALPLGVMVACYALLGRTLLAARGPERRRALRVVVALVAAFVVLQLPYSLALLLDTADLLAARERSCPASKRKDVALLVTSGLALARCGLNPVLYAFLGLRFRQDLRRLLRGGGCPSGPHRRRGCPRRPRLSSCSAPTETHSLSWDN

SEQ ID NO: 138 - protein, 362 aa, Artificial Sequence
  >sp|Q9JL21|CCR10_MOUSE
MGTKPTEQVSWGLYSGYDEEAYSVGPLPELCYKADVQAFSRAFQPSVSLMVAVLGLAGNGLVLATHLAARRTTRSPTSVHLLQLALADLLLALTLPFAAAGALQGWNLGSTTCRAISGLYSASFHAGFLFLACISADRYVAIARALPAGQRPSTPSRAHLVSVFVWLLSLFLALPALLFSRDGPREGQRRCRLIFPESLTQTVKGASAVAQVVLGFALPLGVMAACYALLGRTLLAARGPERRRALRVVVALVVAFVVLQLPYSLALLLDTADLLAARERSCSSSKRKDLALLVTGGLTLVRCSLNPVLYAFLGLRFRRDLRRLLQGGGCSPKPNPRGRCPRRLRLSSCSAPTETHSLSWDN

SEQ ID NO: 139 - protein, 350 aa, Artificial Sequence
  >sp|P25024|CXCR1_HUMAN
MSNITDPQMWDFDDLNFTGMPPADEDYSPCMLETETLNKYVVIIAYALVFLLSLLGNSLVMLVILYSRVGRSVTDVYLLNLALADLLFALTLPIWAASKVNGWIFGTFLCKVVSLLKEVNFYSGILLLACISVDRYLAIVHATRTLTQKRHLVKFVCLGCWGLSMNLSLPFFLFRQAYHPNNSSPVCYEVLGNDTAKWRMVLRILPHTFGFIVPLFVMLFCYGFTLRTLFKAHMGQKHRAMRVIFAVVLIFLLCWLPYNLVLLADTLMRTQVIQESCERRNNIGRALDATEILGFLHSCLNPIIYAFIGQNFRHGFLKILAMHGLVSKEFLARHRVTSYTSSSVNVSSNL

SEQ ID NO: 140 - protein, 274 aa, Artificial Sequence
  >tr|A0A2K5X9E4|CXCR1_MACFA
MSNATDPQMGDDDYDLNFTGMPPTDEDYSPCRLETQSLNKYVVIVTYALVFLLSLLGNSLVMLVILYRRVGRSVTDVYLLNLAMADLLFALTLPIWAASKAYHPNNATPVCYEVLGNDTAKWRMVLRILPHTFGFTLPLLIMLFCYGFTLHTLFKAHIGQKHRAMRVIFAVVLIFLLCWLPYNLVLLADTLMRTHLIKESCERRNDIGRALDATEILGFLHSCLNPIIYAFIGQNFRHGFLKILATHGLVSKEFLARHHVTSYTSSSVNVSSNL

SEQ ID NO: 141 - protein, 351 aa, Artificial Sequence
  >sp|Q810W6|CXCR1_MOUSE
MAEAEYFIWTNPEGDFEKEFGNITGMLPTGDYFIPCKRVPITNRQALVVFYALVSLLSLLGNSLVMLVILYRRRTRSVMDVYVLNLAIADLLFSLTLPFLAVSKLKGWIFGTPLCKMVSLLKEFNFFSGILLLACISVDRYLAIVHATRTLARKRYLVKFVCVGIWGLSLILSLPFAIFRQAYKPFRSGTVCYEVLGEATTDFRMTLRGLSHIFGFLLPLLTMLVCYGLTLRMLFKTHMRQKHRAMGVIFAVVLVFLLCCLPYNLVLLSDTLLGAHLIEDTCERRNDIDQALYITEILGFSHSCLNPIIYAFVGQNFRHEFLKILANHGLVRKEVLTHRRVAFHTSLTAIY

SEQ ID NO: 142 - protein, 360 aa, Artificial Sequence
  >sp|P25025|CXCR2_HUMAN
MEDFNMESDSFEDFWKGEDLSNYSYSSTLPPFLLDAAPCEPESLEINKYFVVIIYALVFLLSLLGNSLVMLVILYSRVGRSVTDVYLLNLALADLLFALTLPIWAASKVNGWIFGTFLCKVVSLLKEVNFYSGILLLACISVDRYLAIVHATRTLTQKRYLVKFICLSIWGLSLLLALPVLLFRRTVYSSNVSPACYEDMGNNTANWRMLLRILPQSFGFIVPLLIMLFCYGFTLRTLFKAHMGQKHRAMRVIFAVVLIFLLCWLPYNLVLLADTLMRTQVIQETCERRNHIDRALDATEILGILHSCLNPLIYAFIGQKFRHGLLKILAIHGLISKDSLPKDSRPSFVGSSSGHTSTTL

SEQ ID NO: 143 - protein, 353 aa, Artificial Sequence
  >sp|Q28519|CXCR2_MACMU
FNMESDSFEDLWKGEDFSNYSYSSDLPPSLPDVAPCRPESLEINKYFVVIIYALVFLLSLLGNSLVMLVILYSRVGRSVTDVYLLNLALADLLFALTLPIWAASKVNGWIFGTFLCKVVSLLKEVNFYSGILLLACISVDRYLAIVHATRTLTQKRYLVKFICLSIWGLSLLLALPVLLFRRTVYSSNVSPACYEDMGNNTANWRMLLRILPQSFGFIVPLLIMLFCYGFTLRTLFKAHMGQKHRAMRVIFAVVLIFLLCWLPYSLVLLADTLMRTQVIQETCERRNHIDRALDATEILGILHSCLNPLIYAFIGQKFRHGLLKILAIHGLISKDSLPKDSRPSFVGSSSGHT

SEQ ID NO: 144 - protein, 359 aa, Artificial Sequence
  >sp|P35343|CXCR2_MOUSE
MGEFKVDKFNIEDFFSGDLDIFNYSSGMPSILPDAVPCHSENLEINSYAVVVIYVLVTLLSLVGNSLVMLVILYNRSTCSVTDVYLLNLAIADLFFALTLPVWAASKVNGWTFGSTLCKIFSYVKEVTFYSSVLLLACISMDRYLAIVHATSTLIQKRHLVKFVCIAMWLLSVILALPILILRNPVKVNLSTLVCYEDVGNNTSRLRVVLRILPQTFGFLVPLLIMLFCYGFTLRTLFKAHMGQKHRAMRVIFAVVLVFLLCWLPYNLVLFTDTLMRTKLIKETCERRDDIDKALNATEILGFLHSCLNPIIYAFIGQKFRHGLLKIMATYGLVSKEFLAKEGRPSFVSSSSANTSTTL

SEQ ID NO: 145 - protein, 368 aa, Artificial Sequence
  >sp|P49682|CXCR3_HUMAN
MVLEVSDHQVLNDAEVAALLENFSSSYDYGENESDSCCTSPPCPQDFSLNFDRAFLPALYSLLFLLGLLGNGAVAAVLLSRRTALSSTDTFLLHLAVADTLLVLTLPLWAVDAAVQWVFGSGLCKVAGALFNINFYAGALLLACISFDRYLNIVHATQLYRRGPPARVTLTCLAVWGLCLLFALPDFIFLSAHHDERLNATHCQYNFPQVGRTALRVLQLVAGFLLPLLVMAYCYAHILAVLLVSRGQRRLRAMRLVVVVVVAFALCWTPYHLVVLVDILMDLGALARNCGRESRVDVAKSVTSGLGYMHCCLNPLLYAFVGVKFRERMWMLLLRLGCPNQRGLQRQPSSSRRDSSWSETSEASYSGL

SEQ ID NO: 146 - protein, 368 aa, Artificial Sequence
  >tr|A0A2K5UV19|CXCR3_MACFA
MVLEVSDHQVLNDAEVAALLENFSSSYDYGENESDSCCTSPPCPQDFSLNFDRAFLPALYSLLFLLGLLGNGAVAAVLLSRRAALSSTDTFLLHLAVADTLLVLTLPLWAVDAAVQWVFGSGLCKVAGALFNINFYAGALLLACISFDRYLNIVHATQLYRRGPPARVTLTCLAVWGLCLLFALPDFIFLSAHHDERLNATHCQYNFPQVGRTALRVLQLVAGFLLPLLVMAYCYAHILAVLLVSRGQRRLRAMRLVVVVVVAFALCWTPYHLVVLVDILMDLGALARNCGRESRVDVAKSVTSGLGYMHCCLNPLLYAFVGVKFRERMWMLLLRLGCPNQRGLQRQPSSSRRDSSWSETSEASYSGL

SEQ ID NO: 147 - protein, 367 aa, Artificial Sequence
  >sp|O88410|CXCR3_MOUSE
MYLEVSERQVLDASDFAFLLENSTSPYDYGENESDFSDSPPCPQDFSLNFDRTFLPALYSLLFLLGLLGNGAVAAVLLSQRTALSSTDTFLLHLAVADVLLVLTLPLWAVDAAVQWVFGPGLCKVAGALFNINFYAGAFLLACISFDRYLSIVHATQIYRRDPRVRVALTCIVVWGLCLLFALPDFIYLSANYDQRLNATHCQYNFPQVGRTALRVLQLVAGFLLPLLVMAYCYAHILAVLLVSRGQRRFRAMRLVVVVVAAFAVCWTPYHLVVLVDILMDVGVLARNCGRESHVDVAKSVTSGMGYMHCCLNPLLYAFVGVKFREQMWMLFTRLGRSDQRGPQRQPSSSRRESSWSETTEASYLGL

SEQ ID NO: 148 - protein, 352 aa, Artificial Sequence
  >sp|P61073|CXCR4_HUMAN
MEGISIYTSDNYTEEMGSGDYDSMKEPCFREENANFNKIFLPTIYSIIFLTGIVGNGLVILVMGYQKKLRSMTDKYRLHLSVADLLFVITLPFWAVDAVANWYFGNFLCKAVHVIYTVNLYSSVLILAFISLDRYLAIVHATNSQRPRKLLAEKVVYVGVWIPALLLTIPDFIFANVSEADDRYICDRFYPNDLWVVVFQFQHIMVGLILPGIVILSCYCIIISKLSHSKGHQKRKALKTTVILILAFFACWLPYYIGISIDSFILLEIIKQGCEFENTVHKWISITEALAFFHCCLNPILYAFLGAKFKTSAQHALTSVSRGSSLKILSKGKRGGHSSVSTESESSSFHSS

SEQ ID NO: 149 - protein, 352 aa, Artificial Sequence
  >sp|Q28474|CXCR4_MACFA
MEGISIYTSDNYTEEMGSGDYDSIKEPCFREENAHFNRIFLPTIYSIIFLTGIVGNGLVILVMGYQKKLRSMTDKYRLHLSVADLLFVITLPFWAVDAVANWYFGNFLCKAVHVIYTVNLYSSVLILAFISLDRYLAIVHATNSQKPRKLLAEKVVYVGVWIPALLLTIPDFIFASVSEADDRYICDRFYPNDLWVVVFQFQHIMVGLILPGIVILSCYCIIISKLSHSKGHQKRKALKTTVILILAFFACWLPYYIGISIDSFILLEIIKQGCEFENTVHKWISITEALAFFHCCLNPILYAFLGAKFKTSAQHALTSVSRGSSLKILSKGKRGGHSSVSTESESSSFHSS

SEQ ID NO: 150 - protein, 359 aa, Artificial Sequence
  >sp|P70658|CXCR4_MOUSE
MEPISVSIYTSDNYSEEVGSGDYDSNKEPCFRDENVHFNRIFLPTIYFIIFLTGIVGNGLVILVMGYQKKLRSMTDKYRLHLSVADLLFVITLPFWAVDAMADWYFGKFLCKAVHIIYTVNLYSSVLILAFISLDRYLAIVHATNSQRPRKLLAEKAVYVGVWIPALLLTIPDFIFADVSQGDISQGDDRYICDRLYPDSLWMVVFQFQHIMVGLILPGIVILSCYCIIISKLSHSKGHQKRKALKTTVILILAFFACWLPYYVGISIDSFILLGVIKQGCDFESIVHKWISITEALAFFHCCLNPILYAFLGAKFKSSAQHALNSMSRGSSLKILSKGKRGGHSSVSTESESSSFHSS

SEQ ID NO: 151 - protein, 372 aa, Artificial Sequence
  >sp|P32302|CXCR5_HUMAN
MNYPLTLEMDLENLEDLFWELDRLDNYNDTSLVENHLCPATEGPLMASFKAVFVPVAYSLIFLLGVIGNVLVLVILERHRQTRSSTETFLFHLAVADLLLVFILPFAVAEGSVGWVLGTFLCKTVIALHKVNFYCSSLLLACIAVDRYLAIVHAVHAYRHRRLLSIHITCGTIWLVGFLLALPEILFAKVSQGHHNNSLPRCTFSQENQAETHAWFTSRFLYHVAGFLLPMLVMGWCYVGVVHRLRQAQRRPQRQKAVRVAILVTSIFFLCWSPYHIVIFLDTLARLKAVDNTCKLNGSLPVAITMCEFLGLAHCCLNPMLYTFAGVKFRSDLSRLLTKLGCTGPASLCQLFPSWRRSSLSESENATSLTTF

SEQ ID NO: 152 - protein, 372 aa, Artificial Sequence
  >tr|G8F5K4|CXCR5_MACFA
MNYPLMLEMDLENLEDLFLEFDKFDNYNDTSLVENHLCPATEGPLMASFKAVFVPVAYSLIFLLGVIGNVLVLVILERHRQTRSSTETFLFHLAVADLLLVFILPFAVAEGSVGWVLGTFLCKTVIALHKVNFYCSSLLLACIAVDRYLAIVHAVHAYRHRRLLSIHITCGTIWLVGFLFALPEILFAKVSQAHPNNSLPRCTFSQENQAETHAWFTSRFLYHVAGFLLPMLVMGWCYVGVVHRLRQAQRRPQRQKAVRVAILVTSIFFLCWSPYHIVIFLDTLVRLKAVDNTCELNGSLPVAITMCEFLGLAHCCLNPMLYTFAGVKFRSDLSRLLTKLGCTGPASLCQLFPSWRKSSLSESENATSLTTF

SEQ ID NO: 153 - protein, 374 aa, Artificial Sequence
  >sp|Q04683|CXCR5_MOUSE
MNYPLTLDMGSITYNMDDLYKELAFYSNSTEIPLQDSNFCSTVEGPLLTSFKAVFMPVAYSLIFLLGMMGNILVLVILERHRHTRSSTETFLFHLAVADLLLVFILPFAVAEGSVGWVLGTFLCKTVIALHKINFYCSSLLLACIAVDRYLAIVHAVHAYRRRRLLSIHITCTAIWLAGFLFALPELLFAKVGQPHNNDSLPQCTFSQENEAETRAWFTSRFLYHIGGFLLPMLVMGWCYVGVVHRLLQAQRRPQRQKAVRVAILVTSIFFLCWSPYHIVIFLDTLERLKAVNSSCELSGYLSVAITLCEFLGLAHCCLNPMLYTFAGVKFRSDLSRLLTKLGCAGPASLCQLFPNWRKSSLSESENATSLTTF

SEQ ID NO: 154 - protein, 342 aa, Artificial Sequence
  >sp|O00574|CXCR6_HUMAN
MAEHDYHEDYGFSSFNDSSQEEHQDFLQFSKVFLPCMYLVVFVCGLVGNSLVLVISIFYHKLQSLTDVFLVNLPLADLVFVCTLPFWAYAGIHEWVFGQVMCKSLLGIYTINFYTSMLILTCITVDRFIVVVKATKAYNQQAKRMTWGKVTSLLIWVISLLVSLPQIIYGNVFNLDKLICGYHDEAISTVVLATQMTLGFFLPLLTMIVCYSVIIKTLLHAGGFQKHRSLKIIFLVMAVFLLTQMPFNLMKFIRSTHWEYYAMTSFHYTIMVTEAIAYLRACLNPVLYAFVSLKFRKNFWKLVKDIGCLPYLGVSHQWKSSEDNSKTFSASHNVEATSMFQL

SEQ ID NO: 155 - protein, 343 aa, Artificial Sequence
  >sp|Q9BDS6|CXCR6_MACFA
MAEYDHYEDDGFLNSFNDSSQEEHQDFLQFRKVFLPCMYLVVFVCGLVGNSLVLVISIFYHKLQSLTDVFLVNLPLADLVFVCTLPFWTYAGIHEWIFGQVMCKTLLGVYTINFYTSMLILTCITVDRFIVVVKATKAYNQQAKRMTWGKVICLLIWVISLLVSLPQIIYGNVFNLDKLICGYHDEEISTVVLATQMTLGFFLPLLAMIVCYSVIIKTLLHAGGFQKHRSLKIIFLVMAVFLLTQTPFNLVKLIRSTRWEYYAMTSFHYTIIVTEAIAYLRACLNPVLYAFVSLKFRKNFWKLVKDIGCLPYLGVSHQWKSSEDNSKTFSASHNVEATSMFQL

SEQ ID NO: 156 - protein, 351 aa, Artificial Sequence
  >sp|Q9EQ16|CXCR6_MOUSE
MDDGHQESALYDGHYEGDFWLFNNSSDNSQENKRFLKFKEVFLPCVYLVVFVFGLLGNSLVLIIYIFYQKLRTLTDVFLLNLPLADLVFVCTLPFWAYAGTYEWVFGTVMCKTLRGMYTMNFYVSMLTLTCITVDRFIVVVQATKAFNRQAKWKIWGQVICLLIWVVSLLVSLPQIIYGHVQDIDKLICQYHSEEISTMVLVIQMTLGFFLPLLTMILCYSGIIKTLLHARNFQKHKSLKIIFLVVAVFLLTQTPFNLAMLIQSTSWEYYTITSFKYAIVVTEAIAYFRACLNPVLYAFVGLKFRKNVWKLMKDIGCLSHLGVSSQWKSSEDSSKTCSASHNVETTSMFQL

SEQ ID NO: 157 - protein, 20 aa, Artificial Sequence
  >sp|P49238|CX3CR1_HUMAN_TRD
MDQFPESVTENFEYDDLAEA

SEQ ID NO: 158 - protein, 20 aa, Artificial Sequence
  >sp|Q6Y3J6|CX3CR1_MACFA_TRD
LRNVEANFLGFLLPLLIMSY

SEQ ID NO: 159 - protein, 21 aa, Artificial Sequence
  >sp|Q9Z0D9|CX3CR1_MOUSE_TRD
MSTSFPELDLENFEYDDSAEA

SEQ ID NO: 160 - protein, 31 aa, Artificial Sequence
  >sp|P49238|CX3CR1_HUMAN_N term
  misc_feature (21)..(21): Xaa can be any naturally occurring amino acid
MDQFPESVTENFEYDDLAEAXYIGDIVVFGT

SEQ ID NO: 161 - protein, 31 aa, Artificial Sequence
  >sp|Q6Y3J6|CX3CR1_MACFA_N term
  misc_feature (21)..(21): Xaa can be any naturally occurring amino acid
LRNVEANFLGFLLPLLIMSYXYFRIIQTLFS

SEQ ID NO: 162 - protein, 32 aa, Artificial Sequence
  >sp|Q9Z0D9|CX3CR1_MOUSE_N term
  misc_feature (22)..(22): Xaa can be any naturally occurring amino acid
MSTSFPELDLENFEYDDSAEAXYLGDIVAFGT

SEQ ID NO: 163 - protein, 29 aa, Artificial Sequence
  >sp|P25024|CXCR1_HUMAN_TRD
MSNITDPQMWDFDDLNFTGMPPADEDYSP

SEQ ID NO: 164 - protein, 30 aa, Artificial Sequence; identical to SEQ ID NO: 74
  >sp|Q2YEG0|CXCR1_MACMU_TRD

SEQ ID NO: 165 - protein, 35 aa, Artificial Sequence; identical to SEQ ID NO: 75
  >sp|Q810W6|CXCR1_MOUSE_TRD

SEQ ID NO: 166 - protein, 39 aa, Artificial Sequence; identical to SEQ ID NO: 76
  >sp|P25024|CXCR1_HUMAN_N term
  misc_feature (30)..(30): Xaa can be any naturally occurring amino acid

SEQ ID NO: 167 - protein, 46 aa, Artificial Sequence
  >sp|Q2YEG0|CXCR1_MACMU_N term
  misc_feature (31)..(31): Xaa can be any naturally occurring amino acid
MSNATDPQMGDDDYDLNFTGMPPTDEDYSPXRLETQSLNKYVVIVT

SEQ ID NO: 168 - protein, 44 aa, Artificial Sequence; identical to SEQ ID NO: 78
  >sp|Q810W6|CXCR1_MOUSE_N term
  misc_feature (36)..(36): Xaa can be any naturally occurring amino acid

SEQ ID NO: 169-200 - skipped (32 entries)

SEQ ID NO: 201 - protein, 115 aa, Artificial Sequence
  TPP-14095_497A-M005-E07 -hIgG1Lambda_VH
EVQLLESGGGLVQPGGSLRLSCAASGFTFSSYGMHWVRQAPGKGLEWVSAISGSGGSTYYADSVKGRFTISRDNSKNTLYLQMNSLRAEDTAVYYCARGRQLGSWGQGTLVTVSS

SEQ ID NO: 202 - protein, 5 aa, Artificial Sequence
  TPP-14095_497A-M005-E07 -hIgG1Lambda_HCDR1
SYGMH

SEQ ID NO: 203 - protein, 17 aa, Artificial Sequence
  TPP-14095_497A-M005-E07 -hIgG1Lambda_HCDR2
AISGSGGSTYYADSVKG

SEQ ID NO: 204 - protein, 6 aa, Artificial Sequence
  TPP-14095_497A-M005-E07 -hIgG1Lambda_HCDR3
GRQLGS

SEQ ID NO: 205 - protein, 110 aa, Artificial Sequence
  TPP-14095_497A-M005-E07 -hIgG1Lambda_VL
QSVLTQPPSASGTPGQRVTISCSGSSSNIGSNYVYWYQQLPGTAPKLLIYGNNNRPSGVPDRFSGSKSGTSASLAISGLRSEDEADYYCAAWDDSLNGWVFGGGTKLTVL

SEQ ID NO: 206 - protein, 13 aa, Artificial Sequence
  TPP-14095_497A-M005-E07 -hIgG1Lambda_LCDR1
SGSSSNIGSNYVY

SEQ ID NO: 207 - protein, 7 aa, Artificial Sequence
  TPP-14095_497A-M005-E07 -hIgG1Lambda_LCDR2
GNNNRPS

SEQ ID NO: 208 - protein, 11 aa, Artificial Sequence
  TPP-14095_497A-M005-E07 -hIgG1Lambda_LCDR3
AAWDDSLNGWV

SEQ ID NO: 209 - DNA, 345 bp, Artificial Sequence
  TPP-14095_497A-M005-E07 -hIgG1Lambda_VH
gaagttcagctgctggaatctggcggcggactggttcaacctggcggatctctgagactgagctgtgccgccagcggcttcacctttagcagctatggcatgcactgggtccgacaggcccctggcaaaggacttgaatgggtgtccgccatctctggcagcggcggcagcacatattacgccgattctgtgaagggcagattcaccatcagccgggacaacagcaagaacaccctgtacctgcagatgaacagcctgagagccgaggacaccgccgtgtactattgtgccagaggcagacagctcggctcttggggacagggaacactggttacagtgtcctca

SEQ ID NO: 210 - DNA, 330 bp, Artificial Sequence
  TPP-14095_497A-M005-E07 -hIgG1Lambda_VL
cagtctgttctgacacagcctcctagcgcctctggcacacctggacagagagtgaccatcagctgtagcggcagcagctccaacatcggcagcaactacgtgtactggtatcagcagctgcccggcacagcccctaaactgctgatctacggcaacaacaacagacccagcggcgtgcccgatagattcagcggctctaagtctggcacaagcgccagcctggccatctctggactgagatctgaggacgaggccgactactattgcgccgcctgggacgattctctgaacggctgggttttcggcggaggcaccaaactgacagtgcta

SEQ ID NO: 211 - protein, 444 aa, Artificial Sequence
  TPP-14095_497A-M005-E07 -hIgG1Lambda_Heavy Chain
EVQLLESGGGLVQPGGSLRLSCAASGFTFSSYGMHWVRQAPGKGLEWVSAISGSGGSTYYADSVKGRFTISRDNSKNTLYLQMNSLRAEDTAVYYCARGRQLGSWGQGTLVTVSSASTKGPSVFPLAPSSKSTSGGTAALGCLVKDYFPEPVTVSWNSGALTSGVHTFPAVLQSSGLYSLSSVVTVPSSSLGTQTYICNVNHKPSNTKVDKKVEPKSCDKTHTCPPCPAPELLGGPSVFLFPPKPKDTLMISRTPEVTCVVVDVSHEDPEVKFNWYVDGVEVHNAKTKPREEQYNSTYRVVSVLTVLHQDWLNGKEYKCKVSNKALPAPIEKTISKAKGQPREPQVYTLPPSRDELTKNQVSLTCLVKGFYPSDIAVEWESNGQPENNYKTTPPVLDSDGSFFLYSKLTVDKSRWQQGNVFSCSVMHEALHNHYTQKSLSLSPG

SEQ ID NO: 212 - protein, 216 aa, Artificial Sequence
  TPP-14095_497A-M005-E07 -hIgG1Lambda_Light Chain
QSVLTQPPSASGTPGQRVTISCSGSSSNIGSNYVYWYQQLPGTAPKLLIYGNNNRPSGVPDRFSGSKSGTSASLAISGLRSEDEADYYCAAWDDSLNGWVFGGGTKLTVLGQPKAAPSVTLFPPSSEELQANKATLVCLISDFYPGAVTVAWKADSSPVKAGVETTTPSKQSNNKYAASSYLSLTPEQWKSHRSYSCQVTHEGSTVEKTVAPTECS

SEQ ID NO: 213 - DNA, 1332 bp, Artificial Sequence
  TPP-14095_497A-M005-E07 -hIgG1Lambda_Heavy Chain
gaagttcagctgctggaatctggcggcggactggttcaacctggcggatctctgagactgagctgtgccgccagcggcttcacctttagcagctatggcatgcactgggtccgacaggcccctggcaaaggacttgaatgggtgtccgccatctctggcagcggcggcagcacatattacgccgattctgtgaagggcagattcaccatcagccgggacaacagcaagaacaccctgtacctgcagatgaacagcctgagagccgaggacaccgccgtgtactattgtgccagaggcagacagctcggctcttggggacagggaacactggttacagtgtcctcagccagcaccaagggccccagcgtgttccctctggcccctagcagcaagagcacatctggcggaacagccgccctgggctgcctcgtgaaggactactttcccgagcccgtgaccgtgtcctggaactctggcgctctgacaagcggcgtgcacacctttccagccgtgctgcagagcagcggcctgtactctctgagcagcgtcgtgacagtgcccagcagctctctgggcacccagacctacatctgcaacgtgaaccacaagcccagcaacaccaaggtggacaagaaggtggaacccaagagctgcgacaagacccacacctgtcccccttgtcctgcccccgaactgctgggaggcccttccgtgttcctgttccccccaaagcccaaggacaccctgatgatcagccggacccccgaagtgacctgcgtggtggtggatgtgtcccacgaggaccctgaagtgaagttcaattggtacgtggacggcgtggaagtgcacaacgccaagaccaagcctagagaggaacagtacaacagcacctaccgggtggtgtccgtgctgacagtgctgcaccaggactggctgaacggcaaagagtacaagtgcaaggtgtccaacaaggccctgcctgcccccatcgagaaaaccatcagcaaggccaagggccagccccgcgaaccccaggtgtacacactgcccccaagcagggacgagctgaccaagaaccaggtgtccctgacctgtctcgtgaaaggcttctacccctccgatatcgccgtggaatgggagagcaacggccagcccgagaacaactacaagaccaccccccctgtgctggacagcgacggctcattcttcctgtacagcaagctgaccgtggacaagtcccggtggcagcagggcaacgtgttcagctgcagcgtgatgcacgaggccctgcacaaccactacacccagaagtccctgagcctgagccctggc

SEQ ID NO: 214 - DNA, 648 bp, Artificial Sequence
  TPP-14095_497A-M005-E07 -hIgG1Lambda_Light Chain
cagtctgttctgacacagcctcctagcgcctctggcacacctggacagagagtgaccatcagctgtagcggcagcagctccaacatcggcagcaactacgtgtactggtatcagcagctgcccggcacagcccctaaactgctgatctacggcaacaacaacagacccagcggcgtgcccgatagattcagcggctctaagtctggcacaagcgccagcctggccatctctggactgagatctgaggacgaggccgactactattgcgccgcctgggacgattctctgaacggctgggttttcggcggaggcaccaaactgacagtgctaggccagcctaaagccgcccctagcgtgaccctgttccctccaagcagcgaggaactgcaggccaacaaggccaccctcgtgtgcctgatcagcgacttctatcctggcgccgtgaccgtggcctggaaggccgatagctctcctgtgaaggccggcgtggaaaccaccacccctagcaagcagagcaacaacaaatacgccgccagcagctacctgagcctgacccccgagcagtggaagtcccacagatcctacagctgccaagtgacccacgagggcagcaccgtggaaaagacagtggcccctaccgagtgcagc

SEQ ID NO: 215 - protein, 112 aa, Artificial Sequence
  TPP-14099_497A-M005-F02 -hIgG1Lambda_VH
EVQLLESGGGLVQPGGSLRLSCAASGFTFSDYGVHWVRQAPGKGLEWVSGVSWNGSRTHYADSVKGRFTISRDNSKNTLYLQMNSLRAEDTAVYYCVTRGAWGQGTLVTVSS

SEQ ID NO: 216 - protein, 5 aa, Artificial Sequence
  TPP-14099_497A-M005-F02 -hIgG1Lambda_HCDR1
DYGVH

SEQ ID NO: 217 - protein, 17 aa, Artificial Sequence
  TPP-14099_497A-M005-F02 -hIgG1Lambda_HCDR2
GVSWNGSRTHYADSVKG

SEQ ID NO: 218 - protein, 3 aa, Artificial Sequence
  TPP-14099_497A-M005-F02 -hIgG1Lambda_HCDR3
RGA

SEQ ID NO: 219 - protein, 110 aa, Artificial Sequence
  TPP-14099_497A-M005-F02 -hIgG1Lambda_VL
QSVLTQPPSASGTPGQRVTISCSGSSFNIGSHFVYWYQQLPGTAPKLLIYKNNQRPSGVPDRFSGSKSGTSASLAISGLRSEDEADYYCAAWDDSLNGPVFGGGTKLTVL

SEQ ID NO: 220 - protein, 13 aa, Artificial Sequence
  TPP-14099_497A-M005-F02 -hIgG1Lambda_LCDR1
SGSSFNIGSHFVY

SEQ ID NO: 221 - protein, 7 aa, Artificial Sequence
  TPP-14099_497A-M005-F02 -hIgG1Lambda_LCDR2
KNNQRPS

SEQ ID NO: 222 - protein, 11 aa, Artificial Sequence
  TPP-14099_497A-M005-F02 -hIgG1Lambda_LCDR3
AAWDDSLNGPV

SEQ ID NO: 223 - DNA, 336 bp, Artificial Sequence
  TPP-14099_497A-M005-F02 -hIgG1Lambda_VH
gaagttcagctgctggaatctggcggcggactggttcaacctggcggatctctgagactgagctgtgccgccagcggcttcacctttagcgattatggcgtgcactgggtccgacaggcccctggaaaaggactggaatgggtttcaggcgtgtcctggaacggcagcagaacccactatgccgacagcgtgaagggcagattcaccatcagccgggacaacagcaagaacaccctgtacctgcagatgaacagcctgagagccgaggacaccgccgtgtactactgtgtgacaagaggcgcttggggccagggcacactggtcacagtttcttca

SEQ ID NO: 224 - DNA, 330 bp, Artificial Sequence
  TPP-14099_497A-M005-F02 -hIgG1Lambda_VL
cagtctgttctgacacagcctcctagcgcctctggcacacctggacagagagtgaccatcagctgtagcggcagcagcttcaacatcggcagccacttcgtgtactggtatcagcagctgcctggcacagcccctaaactgctgatctacaagaacaaccagcggcctagcggcgtgcccgatagattttctggcagcaagagcggcacaagcgccagcctggctatctctggactgagatctgaggacgaggccgactactattgcgccgcctgggacgattctctgaacggccctgtttttggcggaggcaccaagctgacagtgcta

SEQ ID NO: 225 - protein, 441 aa, Artificial Sequence
  TPP-14099_497A-M005-F02 -hIgG1Lambda_Heavy Chain
EVQLLESGGGLVQPGGSLRLSCAASGFTFSDYGVHWVRQAPGKGLEWVSGVSWNGSRTHYADSVKGRFTISRDNSKNTLYLQMNSLRAEDTAVYYCVTRGAWGQGTLVTVSSASTKGPSVFPLAPSSKSTSGGTAALGCLVKDYFPEPVTVSWNSGALTSGVHTFPAVLQSSGLYSLSSVVTVPSSSLGTQTYICNVNHKPSNTKVDKKVEPKSCDKTHTCPPCPAPELLGGPSVFLFPPKPKDTLMISRTPEVTCVVVDVSHEDPEVKFNWYVDGVEVHNAKTKPREEQYNSTYRVVSVLTVLHQDWLNGKEYKCKVSNKALPAPIEKTISKAKGQPREPQVYTLPPSRDELTKNQVSLTCLVKGFYPSDIAVEWESNGQPENNYKTTPPVLDSDGSFFLYSKLTVDKSRWQQGNVFSCSVMHEALHNHYTQKSLSLSPG

SEQ ID NO: 226 - protein, 216 aa, Artificial Sequence
  TPP-14099_497A-M005-F02 -hIgG1Lambda_Light Chain
QSVLTQPPSASGTPGQRVTISCSGSSFNIGSHFVYWYQQLPGTAPKLLIYKNNQRPSGVPDRFSGSKSGTSASLAISGLRSEDEADYYCAAWDDSLNGPVFGGGTKLTVLGQPKAAPSVTLFPPSSEELQANKATLVCLISDFYPGAVTVAWKADSSPVKAGVETTTPSKQSNNKYAASSYLSLTPEQWKSHRSYSCQVTHEGSTVEKTVAPTECS

SEQ ID NO: 227 - DNA, 1323 bp, Artificial Sequence
  TPP-14099_497A-M005-F02 -hIgG1Lambda_Heavy Chain
gaagttcagctgctggaatctggcggcggactggttcaacctggcggatctctgagactgagctgtgccgccagcggcttcacctttagcgattatggcgtgcactgggtccgacaggcccctggaaaaggactggaatgggtttcaggcgtgtcctggaacggcagcagaacccactatgccgacagcgtgaagggcagattcaccatcagccgggacaacagcaagaacaccctgtacctgcagatgaacagcctgagagccgaggacaccgccgtgtactactgtgtgacaagaggcgcttggggccagggcacactggtcacagtttcttcagccagcaccaagggccccagcgtgttccctctggcccctagcagcaagagcacatctggcggaacagccgccctgggctgcctcgtgaaggactactttcccgagcccgtgaccgtgtcctggaactctggcgctctgacaagcggcgtgcacacctttccagccgtgctgcagagcagcggcctgtactctctgagcagcgtcgtgacagtgcccagcagctctctgggcacccagacctacatctgcaacgtgaaccacaagcccagcaacaccaaggtggacaagaaggtggaacccaagagctgcgacaagacccacacctgtcccccttgtcctgcccccgaactgctgggaggcccttccgtgttcctgttccccccaaagcccaaggacaccctgatgatcagccggacccccgaagtgacctgcgtggtggtggatgtgtcccacgaggaccctgaagtgaagttcaattggtacgtggacggcgtggaagtgcacaacgccaagaccaagcctagagaggaacagtacaacagcacctaccgggtggtgtccgtgctgacagtgctgcaccaggactggctgaacggcaaagagtacaagtgcaaggtgtccaacaaggccctgcctgcccccatcgagaaaaccatcagcaaggccaagggccagccccgcgaaccccaggtgtacacactgcccccaagcagggacgagctgaccaagaaccaggtgtccctgacctgtctcgtgaaaggcttctacccctccgatatcgccgtggaatgggagagcaacggccagcccgagaacaactacaagaccaccccccctgtgctggacagcgacggctcattcttcctgtacagcaagctgaccgtggacaagtcccggtggcagcagggcaacgtgttcagctgcagcgtgatgcacgaggccctgcacaaccactacacccagaagtccctgagcctgagccctggc

SEQ ID NO: 228 - DNA, 648 bp, Artificial Sequence
  TPP-14099_497A-M005-F02 -hIgG1Lambda_Light Chain
cagtctgttctgacacagcctcctagcgcctctggcacacctggacagagagtgaccatcagctgtagcggcagcagcttcaacatcggcagccacttcgtgtactggtatcagcagctgcctggcacagcccctaaactgctgatctacaagaacaaccagcggcctagcggcgtgcccgatagattttctggcagcaagagcggcacaagcgccagcctggctatctctggactgagatctgaggacgaggccgactactattgcgccgcctgggacgattctctgaacggccctgtttttggcggaggcaccaagctgacagtgctaggccagcctaaagccgcccctagcgtgaccctgttccctccaagcagcgaggaactgcaggccaacaaggccaccctcgtgtgcctgatcagcgacttctatcctggcgccgtgaccgtggcctggaaggccgatagctctcctgtgaaggccggcgtggaaaccaccacccctagcaagcagagcaacaacaaatacgccgccagcagctacctgagcctgacccccgagcagtggaagtcccacagatcctacagctgccaagtgacccacgagggcagcaccgtggaaaagacagtggcccctaccgagtgcagc

SEQ ID NO: 229 - protein, 112 aa, Artificial Sequence; identical to SEQ ID NO: 215
  TPP-15285_497A-M005-F02-mIgG2aLambda_VH

SEQ ID NO: 230 - protein, 5 aa, Artificial Sequence
  TPP-15285_497A-M005-F02-mIgG2aLambda_HCDR1
DYGVH

SEQ ID NO: 231 - protein, 17 aa, Artificial Sequence
  TPP-15285_497A-M005-F02-mIgG2aLambda_HCDR2
GVSWNGSRTHYADSVKG

SEQ ID NO: 232 - protein, 3 aa, Artificial Sequence
  TPP-15285_497A-M005-F02-mIgG2aLambda_HCDR3
RGA

SEQ ID NO: 233 - protein, 110 aa, Artificial Sequence; identical to SEQ ID NO: 219
  TPP-15285_497A-M005-F02-mIgG2aLambda_VL

SEQ ID NO: 234 - protein, 13 aa, Artificial Sequence
  TPP-15285_497A-M005-F02-mIgG2aLambda_LCDR1
SGSSFNIGSHFVY

SEQ ID NO: 235 - protein, 7 aa, Artificial Sequence
  TPP-15285_497A-M005-F02-mIgG2aLambda_LCDR2
KNNQRPS

SEQ ID NO: 236 - protein, 11 aa, Artificial Sequence
  TPP-15285_497A-M005-F02-mIgG2aLambda_LCDR3
AAWDDSLNGPV

SEQ ID NO: 237 - DNA, 336 bp, Artificial Sequence; identical to SEQ ID NO: 223
  TPP-15285_497A-M005-F02-mIgG2aLambda_VH

SEQ ID NO: 238 - DNA, 330 bp, Artificial Sequence; identical to SEQ ID NO: 224
  TPP-15285_497A-M005-F02-mIgG2aLambda_VL

SEQ ID NO: 239 - protein, 442 aa, Artificial Sequence
  TPP-15285_497A-M005-F02-mIgG2aLambda_Heavy Chain
EVQLLESGGGLVQPGGSLRLSCAASGFTFSDYGVHWVRQAPGKGLEWVSGVSWNGSRTHYADSVKGRFTISRDNSKNTLYLQMNSLRAEDTAVYYCVTRGAWGQGTLVTVSSAKTTAPSVYPLAPVCGDTTGSSVTLGCLVKGYFPEPVTLTWNSGSLSSGVHTFPAVLQSDLYTLSSSVTVTSSTWPSQSITCNVAHPASSTKVDKKIEPRGPTIKPCPPCKCPAPNLLGGPSVFIFPPKIKDVLMISLSPIVTCVVVDVSEDDPDVQISWFVNNVEVHTAQTQTHREDYNSTLRVVSALPIQHQDWMSGKEFKCKVNNKDLPAPIERTISKPKGSVRAPQVYVLPPPEEEMTKKQVTLTCMVTDFMPEDIYVEWTNNGKTELNYKNTEPVLDSDGSYFMYSKLRVEKKNWVERNSYSCSVVHEGLHNHHTTKSFSRTPGK

SEQ ID NO: 240 - protein, 216 aa, Artificial Sequence
  TPP-15285_497A-M005-F02-mIgG2aLambda_Light Chain
QSVLTQPPSASGTPGQRVTISCSGSSFNIGSHFVYWYQQLPGTAPKLLIYKNNQRPSGVPDRFSGSKSGTSASLAISGLRSEDEADYYCAAWDDSLNGPVFGGGTKLTVLGQPKSSPSVTLFPPSSEELETNKATLVCTITDFYPGVVTVDWKVDGTPVTQGMETTQPSKQSNNKYMASSYLTLTARAWERHSSYSCQVTHEGHTVEKSLSRADCS

SEQ ID NO: 241 - DNA, 1326 bp, Artificial Sequence
  TPP-15285_497A-M005-F02-mIgG2aLambda_Heavy Chain
gaagttcagctgctggaatctggcggcggactggttcaacctggcggatctctgagactgagctgtgccgccagcggcttcacctttagcgattatggcgtgcactgggtccgacaggcccctggaaaaggactggaatgggtttcaggcgtgtcctggaacggcagcagaacccactatgccgacagcgtgaagggcagattcaccatcagccgggacaacagcaagaacaccctgtacctgcagatgaacagcctgagagccgaggacaccgccgtgtactactgtgtgacaagaggcgcttggggccagggcacactggtcacagtttcttcagccaagaccaccgcccccagcgtgtaccctctggctcctgtgtgtggcgataccaccggcagctctgtgaccctgggctgcctcgtgaagggctacttccctgagccagtgaccctgacctggaacagcggctctctgtctagcggcgtgcacacctttccagccgtgctgcagagcgacctgtacaccctgagcagcagcgtgaccgtgaccagcagcacatggcccagccagagcatcacctgtaacgtggcccaccctgccagctccaccaaggtggacaagaagatcgagcccagaggccccaccatcaagccttgccccccttgcaaatgccctgcccccaatctgctgggcggaccctccgtgttcatcttcccacccaagatcaaggacgtgctgatgatcagcctgagccccatcgtgacctgcgtggtggtggacgtgtccgaggacgaccccgatgtgcagatcagttggttcgtgaacaacgtggaagtgcacaccgcccagacccagacacacagagaggactacaacagcaccctgagagtggtgtccgccctgcccatccagcaccaggattggatgagcggcaaagagttcaagtgcaaagtgaacaacaaggacctgccagcccccatcgagcggaccatctctaagcctaagggcagcgtgcgggctccccaggtgtacgtgctgcctcctccagaggaagagatgaccaagaaacaagtgacactgacatgcatggtcaccgacttcatgcccgaggacatctacgtggaatggaccaacaacggcaagaccgagctgaactacaagaacaccgagcccgtgctggacagcgacggcagctacttcatgtacagcaagctgcgggtggaaaagaaaaactgggtggaacggaacagctacagctgcagcgtggtgcacgagggcctgcacaatcaccacaccaccaagagcttcagccggacccctggcaag

SEQ ID NO: 242 - DNA, 648 bp, Artificial Sequence
  TPP-15285_497A-M005-F02-mIgG2aLambda_Light Chain
cagtctgttctgacacagcctcctagcgcctctggcacacctggacagagagtgaccatcagctgtagcggcagcagcttcaacatcggcagccacttcgtgtactggtatcagcagctgcctggcacagcccctaaactgctgatctacaagaacaaccagcggcctagcggcgtgcccgatagattttctggcagcaagagcggcacaagcgccagcctggctatctctggactgagatctgaggacgaggccgactactattgcgccgcctgggacgattctctgaacggccctgtttttggcggaggcaccaagctgacagtgctaggccagcccaagagcagccctagcgtgaccctgttccctccaagcagcgaggaactggaaacaaacaaggccaccctcgtgtgcaccatcaccgacttctaccccggcgtcgtgaccgtggactggaaggtggacggcaccccagtgacccagggcatggaaaccacccagcccagcaagcagagcaacaacaagtacatggccagcagctacctgaccctgaccgccagagcctgggagagacacagctcctacagctgccaagtgacccacgagggccacaccgtggaaaagagcctgagcagagccgactgcagc

SEQ ID NO: 243 - protein, 115 aa, Artificial Sequence; identical to SEQ ID NO: 201
  TPP-15286_497A-M005-E07-mIgG2aLambda_VH

SEQ ID NO: 244 - protein, 5 aa, Artificial Sequence
  TPP-15286_497A-M005-E07-mIgG2aLambda_HCDR1
SYGMH

SEQ ID NO: 245 - protein, 17 aa, Artificial Sequence
  TPP-15286_497A-M005-E07-mIgG2aLambda_HCDR2
AISGSGGSTYYADSVKG

SEQ ID NO: 246 - protein, 6 aa, Artificial Sequence
  TPP-15286_497A-M005-E07-mIgG2aLambda_HCDR3
GRQLGS

SEQ ID NO: 247 - protein, 110 aa, Artificial Sequence; identical to SEQ ID NO: 205
  TPP-15286_497A-M005-E07-mIgG2aLambda_VL

SEQ ID NO: 248 - protein, 13 aa, Artificial Sequence
  TPP-15286_497A-M005-E07-mIgG2aLambda_LCDR1
SGSSSNIGSNYVY

SEQ ID NO: 249 - protein, 7 aa, Artificial Sequence
  TPP-15286_497A-M005-E07-mIgG2aLambda_LCDR2
GNNNRPS

SEQ ID NO: 250 - protein, 11 aa, Artificial Sequence
  TPP-15286_497A-M005-E07-mIgG2aLambda_LCDR3
AAWDDSLNGWV

SEQ ID NO: 251 - DNA, 345 bp, Artificial Sequence; identical to SEQ ID NO: 209
  TPP-15286_497A-M005-E07-mIgG2aLambda_VH

SEQ ID NO: 252 - DNA, 330 bp, Artificial Sequence; identical to SEQ ID NO: 210
  TPP-15286_497A-M005-E07-mIgG2aLambda_VL

SEQ ID NO: 253 - protein, 445 aa, Artificial Sequence
  TPP-15286_497A-M005-E07-mIgG2aLambda_Heavy Chain
EVQLLESGGGLVQPGGSLRLSCAASGFTFSSYGMHWVRQAPGKGLEWVSAISGSGGSTYYADSVKGRFTISRDNSKNTLYLQMNSLRAEDTAVYYCARGRQLGSWGQGTLVTVSSAKTTAPSVYPLAPVCGDTTGSSVTLGCLVKGYFPEPVTLTWNSGSLSSGVHTFPAVLQSDLYTLSSSVTVTSSTWPSQSITCNVAHPASSTKVDKKIEPRGPTIKPCPPCKCPAPNLLGGPSVFIFPPKIKDVLMISLSPIVTCVVVDVSEDDPDVQISWFVNNVEVHTAQTQTHREDYNSTLRVVSALPIQHQDWMSGKEFKCKVNNKDLPAPIERTISKPKGSVRAPQVYVLPPPEEEMTKKQVTLTCMVTDFMPEDIYVEWTNNGKTELNYKNTEPVLDSDGSYFMYSKLRVEKKNWVERNSYSCSVVHEGLHNHHTTKSFSRTPGK

SEQ ID NO: 254 - protein, 216 aa, Artificial Sequence
  TPP-15286_497A-M005-E07-mIgG2aLambda_Light Chain
QSVLTQPPSASGTPGQRVTISCSGSSSNIGSNYVYWYQQLPGTAPKLLIYGNNNRPSGVPDRFSGSKSGTSASLAISGLRSEDEADYYCAAWDDSLNGWVFGGGTKLTVLGQPKSSPSVTLFPPSSEELETNKATLVCTITDFYPGVVTVDWKVDGTPVTQGMETTQPSKQSNNKYMASSYLTLTARAWERHSSYSCQVTHEGHTVEKSLSRADCS

SEQ ID NO: 255 - DNA, 1335 bp, Artificial Sequence
  TPP-15286_497A-M005-E07-mIgG2aLambda_Heavy Chain
gaagttcagctgctggaatctggcggcggactggttcaacctggcggatctctgagactgagctgtgccgccagcggcttcacctttagcagctatggcatgcactgggtccgacaggcccctggcaaaggacttgaatgggtgtccgccatctctggcagcggcggcagcacatattacgccgattctgtgaagggcagattcaccatcagccgggacaacagcaagaacaccctgtacctgcagatgaacagcctgagagccgaggacaccgccgtgtactattgtgccagaggcagacagctcggctcttggggacagggaacactggttacagtgtcctcagccaagaccaccgcccccagcgtgtaccctctggctcctgtgtgtggcgataccaccggcagctctgtgaccctgggctgcctcgtgaagggctacttccctgagccagtgaccctgacctggaacagcggctctctgtctagcggcgtgcacacctttccagccgtgctgcagagcgacctgtacaccctgagcagcagcgtgaccgtgaccagcagcacatggcccagccagagcatcacctgtaacgtggcccaccctgccagctccaccaaggtggacaagaagatcgagcccagaggccccaccatcaagccttgccccccttgcaaatgccctgcccccaatctgctgggcggaccctccgtgttcatcttcccacccaagatcaaggacgtgctgatgatcagcctgagccccatcgtgacctgcgtggtggtggacgtgtccgaggacgaccccgatgtgcagatcagttggttcgtgaacaacgtggaagtgcacaccgcccagacccagacacacagagaggactacaacagcaccctgagagtggtgtccgccctgcccatccagcaccaggattggatgagcggcaaagagttcaagtgcaaagtgaacaacaaggacctgccagcccccatcgagcggaccatctctaagcctaagggcagcgtgcgggctccccaggtgtacgtgctgcctcctccagaggaagagatgaccaagaaacaagtgacactgacatgcatggtcaccgacttcatgcccgaggacatctacgtggaatggaccaacaacggcaagaccgagctgaactacaagaacaccgagcccgtgctggacagcgacggcagctacttcatgtacagcaagctgcgggtggaaaagaaaaactgggtggaacggaacagctacagctgcagcgtggtgcacgagggcctgcacaatcaccacaccaccaagagcttcagccggacccctggcaag

SEQ ID NO: 256 - DNA, 648 bp, Artificial Sequence
  TPP-15286_497A-M005-E07-mIgG2aLambda_Light Chain
cagtctgttctgacacagcctcctagcgcctctggcacacctggacagagagtgaccatcagctgtagcggcagcagctccaacatcggcagcaactacgtgtactggtatcagcagctgcccggcacagcccctaaactgctgatctacggcaacaacaacagacccagcggcgtgcccgatagattcagcggctctaagtctggcacaagcgccagcctggccatctctggactgagatctgaggacgaggccgactactattgcgccgcctgggacgattctctgaacggctgggttttcggcggaggcaccaaactgacagtgctaggccagcccaagagcagccctagcgtgaccctgttccctccaagcagcgaggaactggaaacaaacaaggccaccctcgtgtgcaccatcaccgacttctaccccggcgtcgtgaccgtggactggaaggtggacggcaccccagtgacccagggcatggaaaccacccagcccagcaagcagagcaacaacaagtacatggccagcagctacctgaccctgaccgccagagcctgggagagacacagctcctacagctgccaagtgacccacgagggccacaccgtggaaaagagcctgagcagagccgactgcagc

SEQ ID NO: 257 - protein, 119 aa, Artificial Sequence
  TPP-16966_15291-deglyco-hIgG1Lambda_VH
EVQLLESGGGLVQPGGSLRLSCAASGFTFSSYSMNWVRQAPGKGLEWVSGVSWAGSRTHYADSVKGRFTISRDNSKNTLYLQMNSLRAEDTAVYYCARAAAGTRGFDYWGQGTLVTVSS

SEQ ID NO: 258 - protein, 5 aa, Artificial Sequence
  TPP-16966_15291-deglyco-hIgG1Lambda_HCDR1
SYSMN

SEQ ID NO: 259 - protein, 17 aa, Artificial Sequence
  TPP-16966_15291-deglyco-hIgG1Lambda_HCDR2
GVSWAGSRTHYADSVKG

SEQ ID NO: 260 - protein, 10 aa, Artificial Sequence
  TPP-16966_15291-deglyco-hIgG1Lambda_HCDR3
AAAGTRGFDY

SEQ ID NO: 261 - protein, 109 aa, Artificial Sequence
  TPP-16966_15291-deglyco-hIgG1Lambda_VL
QSVLTQPPSASGTPGQRVTISCSGSSSNIGSHIVNWYQQLPGTAPKLLIYGNTNRPSGVPDRFSGSKSGTSASLAISGLRSEDEADYYCSSYTSISTLVFGGGTKLTVL

SEQ ID NO: 262 - protein, 13 aa, Artificial Sequence
  TPP-16966_15291-deglyco-hIgG1Lambda_LCDR1
SGSSSNIGSHIVN

SEQ ID NO: 263 - protein, 7 aa, Artificial Sequence
  TPP-16966_15291-deglyco-hIgG1Lambda_LCDR2
GNTNRPS

SEQ ID NO: 264 - protein, 10 aa, Artificial Sequence
  TPP-16966_15291-deglyco-hIgG1Lambda_LCDR3
SSYTSISTLV

SEQ ID NO: 265 - DNA, 357 bp, Artificial Sequence
  TPP-16966_15291-deglyco-hIgG1Lambda_VH
gaagttcagctgctggaatctggcggcggactggttcaacctggcggatctctgagactgagctgtgccgccagcggcttcacctttagcagctacagcatgaactgggtccgacaggcccctggcaaaggccttgaatgggtttcaggcgtgtcctgggccggcagcagaacccactatgccgacagcgtgaagggcagattcaccatcagccgggacaacagcaagaacaccctgtacctgcagatgaacagcctgagagccgaggacaccgccgtgtactattgtgccagagctgccgccggaaccagaggctttgattattggggccagggcaccctggtcaccgtttcttca

SEQ ID NO: 266 - DNA, 15 bp, Artificial Sequence
  TPP-16966_15291-deglyco-hIgG1Lambda_HCDR1
agctacagcatgaac

SEQ ID NO: 267 - DNA, 51 bp, Artificial Sequence
  TPP-16966_15291-deglyco-hIgG1Lambda_HCDR2
ggcgtgtcctgggccggcagcagaacccactatgccgacagcgtgaagggc

SEQ ID NO: 268 - DNA, 30 bp, Artificial Sequence
  TPP-16966_15291-deglyco-hIgG1Lambda_HCDR3
gctgccgccggaaccagaggctttgattat

SEQ ID NO: 269 - DNA, 327 bp, Artificial Sequence
  TPP-16966_15291-deglyco-hIgG1Lambda_VL
cagtctgttctgacacagcctcctagcgcctctggcacacctggacagagagtgaccatcagctgtagcggcagcagctccaatatcggcagccacatcgtgaactggtatcagcagctgcctggcacagcccctaaactgctgatctacggcaacaccaacagacccagcggcgtgcccgatagattttccggctctaagagcggcacaagcgccagcctggctatctctggactgagatctgaggacgaggccgactactactgcagcagctacaccagcatcagcaccctggtttttggcggaggcaccaagctgacagtgcta

SEQ ID NO: 270 - DNA, 39 bp, Artificial Sequence
  TPP-16966_15291-deglyco-hIgG1Lambda_LCDR1
agcggcagcagctccaatatcggcagccacatcgtgaac

SEQ ID NO: 271 - DNA, 21 bp, Artificial Sequence
  TPP-16966_15291-deglyco-hIgG1Lambda_LCDR2
ggcaacaccaacagacccagc

SEQ ID NO: 272 - DNA, 30 bp, Artificial Sequence
  TPP-16966_15291-deglyco-hIgG1Lambda_LCDR3
agcagctacaccagcatcagcaccctggtt

SEQ ID NO: 273 - protein, 448 aa, Artificial Sequence
  TPP-16966_15291-deglyco-hIgG1Lambda_Heavy Chain
EVQLLESGGGLVQPGGSLRLSCAASGFTFSSYSMNWVRQAPGKGLEWVSGVSWAGSRTHYADSVKGRFTISRDNSKNTLYLQMNSLRAEDTAVYYCARAAAGTRGFDYWGQGTLVTVSSASTKGPSVFPLAPSSKSTSGGTAALGCLVKDYFPEPVTVSWNSGALTSGVHTFPAVLQSSGLYSLSSVVTVPSSSLGTQTYICNVNHKPSNTKVDKKVEPKSCDKTHTCPPCPAPELLGGPSVFLFPPKPKDTLMISRTPEVTCVVVDVSHEDPEVKFNWYVDGVEVHNAKTKPREEQYNSTYRVVSVLTVLHQDWLNGKEYKCKVSNKALPAPIEKTISKAKGQPREPQVYTLPPSRDELTKNQVSLTCLVKGFYPSDIAVEWESNGQPENNYKTTPPVLDSDGSFFLYSKLTVDKSRWQQGNVFSCSVMHEALHNHYTQKSLSLSPG

SEQ ID NO: 274 - protein, 215 aa, Artificial Sequence
  TPP-16966_15291-deglyco-hIgG1Lambda_Light Chain
QSVLTQPPSASGTPGQRVTISCSGSSSNIGSHIVNWYQQLPGTAPKLLIYGNTNRPSGVPDRFSGSKSGTSASLAISGLRSEDEADYYCSSYTSISTLVFGGGTKLTVLGQPKAAPSVTLFPPSSEELQANKATLVCLISDFYPGAVTVAWKADSSPVKAGVETTTPSKQSNNKYAASSYLSLTPEQWKSHRSYSCQVTHEGSTVEKTVAPTECS

SEQ ID NO: 275 - protein, 120 aa, Artificial Sequence
  TPP-17575_497A-M181-C17-1-hIgG1Lambda_VH
EVQLLESGGGLVQPGGSLRLSCAASGFTFRSYAMHWVRQAPGKGLEWVSLISWDGGSTYYADSVKGRFTISRDNSKNTLYLQMNSLRAEDTAVYYCARGGIGRRPGLEYWGQGTLVTVSS

SEQ ID NO: 276 - protein, 5 aa, Artificial Sequence
  TPP-17575_497A-M181-C17-1-hIgG1Lambda_HCDR1
SYAMH

SEQ ID NO: 277 - protein, 17 aa, Artificial Sequence
  TPP-17575_497A-M181-C17-1-hIgG1Lambda_HCDR2
LISWDGGSTYYADSVKG

SEQ ID NO: 278 - protein, 11 aa, Artificial Sequence
  TPP-17575_497A-M181-C17-1-hIgG1Lambda_HCDR3
GGIGRRPGLEY

SEQ ID NO: 279 - protein, 108 aa, Artificial Sequence
  TPP-17575_497A-M181-C17-1-hIgG1Lambda_VL
QSVLTQPPSASGTPGQRVTISCSGSSSNIGNNYVSWYQQLPGTAPKLLIYGNSNRPSGVPDRFSGSKSGTSASLAISGLRSEDEADYYCQTWGTGIRVFGGGTKLTVL

SEQ ID NO: 280 - protein, 13 aa, Artificial Sequence
  TPP-17575_497A-M181-C17-1-hIgG1Lambda_LCDR1
SGSSSNIGNNYVS

SEQ ID NO: 281 - protein, 7 aa, Artificial Sequence
  TPP-17575_497A-M181-C17-1-hIgG1Lambda_LCDR2
GNSNRPS

SEQ ID NO: 282 - protein, 9 aa, Artificial Sequence
  TPP-17575_497A-M181-C17-1-hIgG1Lambda_LCDR3
QTWGTGIRV

SEQ ID NO: 283 - DNA, 360 bp, Artificial Sequence
  TPP-17575_497A-M181-C17-1-hIgG1Lambda_VH
gaggtgcagctgttggagtctgggggaggcttggtacagcctggggggtccctgagactctcctgtgcagcctctggattcaccttcaggagctatgctatgcactgggtccgccaggctccaggcaaggggctggagtgggtctctcttattagttgggatggtggtagcacctactatgcagactctgtgaagggtcgattcaccatctccagagacaattccaagaacacgctgtatctgcaaatgaacagcctgagagccgaggacactgccgtgtattactgtgcgagagggggtatagggcgtcgtcctgggcttgagtactggggccaaggtaccctggtcaccgtgagttca

SEQ ID NO: 284 - DNA, 15 bp, Artificial Sequence
  TPP-17575_497A-M181-C17-1-hIgG1Lambda_HCDR1
agctatgctatgcac

SEQ ID NO: 285 - DNA, 51 bp, Artificial Sequence
  TPP-17575_497A-M181-C17-1-hIgG1Lambda_HCDR2
cttattagttgggatggtggtagcacctactatgcagactctgtgaagggt

SEQ ID NO: 286 - DNA, 33 bp, Artificial Sequence
  TPP-17575_497A-M181-C17-1-hIgG1Lambda_HCDR3
gggggtatagggcgtcgtcctgggcttgagtac

SEQ ID NO: 287 - DNA, 324 bp, Artificial Sequence
  TPP-17575_497A-M181-C17-1-hIgG1Lambda_VL
cagtctgtgctgactcagccaccctcagcgtctgggacccccgggcagagggtcaccatctcctgctctggaagcagctccaacattggaaataattatgtttcctggtatcagcagctcccaggaacggcccccaaactcctcatctatggtaacagcaatcggccctcaggggtccctgaccgattctctggctccaagtctggcacctcagcctccctggccatcagtgggctccggtccgaggatgaggctgattattactgtcagacctggggcactggcattcgggtgttcggcggaggaaccaagctgacggtccta

SEQ ID NO: 288 - DNA, 39 bp, Artificial Sequence
  TPP-17575_497A-M181-C17-1-hIgG1Lambda_LCDR1
tctggaagcagctccaacattggaaataattatgtttcc

SEQ ID NO: 289 - DNA, 21 bp, Artificial Sequence
  TPP-17575_497A-M181-C17-1-hIgG1Lambda_LCDR2
ggtaacagcaatcggccctca

SEQ ID NO: 290 - DNA, 27 bp, Artificial Sequence
  TPP-17575_497A-M181-C17-1-hIgG1Lambda_LCDR3
cagacctggggcactggcattcgggtg

SEQ ID NO: 291 - protein, 449 aa, Artificial Sequence
  TPP-17575_497A-M181-C17-1-hIgG1Lambda_Heavy Chain
EVQLLESGGGLVQPGGSLRLSCAASGFTFRSYAMHWVRQAPGKGLEWVSLISWDGGSTYYADSVKGRFTISRDNSKNTLYLQMNSLRAEDTAVYYCARGGIGRRPGLEYWGQGTLVTVSSASTKGPSVFPLAPSSKSTSGGTAALGCLVKDYFPEPVTVSWNSGALTSGVHTFPAVLQSSGLYSLSSVVTVPSSSLGTQTYICNVNHKPSNTKVDKKVEPKSCDKTHTCPPCPAPELLGGPSVFLFPPKPKDTLMISRTPEVTCVVVDVSHEDPEVKFNWYVDGVEVHNAKTKPREEQYNSTYRVVSVLTVLHQDWLNGKEYKCKVSNKALPAPIEKTISKAKGQPREPQVYTLPPSRDELTKNQVSLTCLVKGFYPSDIAVEWESNGQPENNYKTTPPVLDSDGSFFLYSKLTVDKSRWQQGNVFSCSVMHEALHNHYTQKSLSLSPG

SEQ ID NO: 292 - protein, 214 aa, Artificial Sequence
  TPP-17575_497A-M181-C17-1-hIgG1Lambda_Light Chain
QSVLTQPPSASGTPGQRVTISCSGSSSNIGNNYVSWYQQLPGTAPKLLIYGNSNRPSGVPDRFSGSKSGTSASLAISGLRSEDEADYYCQTWGTGIRVFGGGTKLTVLGQPKAAPSVTLFPPSSEELQANKATLVCLISDFYPGAVTVAWKADSSPVKAGVETTTPSKQSNNKYAASSYLSLTPEQWKSHRSYSCQVTHEGSTVEKTVAPTECS

SEQ ID NO: 293 - protein, 115 aa, Artificial Sequence
  TPP-17576_497A-M136-O21-1-hIgG1Lambda_VH
EVQLLESGGGLVQPGGSLRLSCAASGFTFSSYAMSWVRQAPGKGLEWVGRIRSKANSYATAYAASVKGRFTISRDNSKNTLYLQMNSLRAEDTAVYYCTRPLDSWGQGTLVTVSS

SEQ ID NO: 294 - protein, 5 aa, Artificial Sequence
  TPP-17576_497A-M136-O21-1-hIgG1Lambda_HCDR1
SYAMS

SEQ ID NO: 295 - protein, 19 aa, Artificial Sequence
  TPP-17576_497A-M136-O21-1-hIgG1Lambda_HCDR2
RIRSKANSYATAYAASVKG

SEQ ID NO: 296 - protein, 4 aa, Artificial Sequence
  TPP-17576_497A-M136-O21-1-hIgG1Lambda_HCDR3
PLDS

SEQ ID NO: 297 - protein, 110 aa, Artificial Sequence
  TPP-17576_497A-M136-O21-1-hIgG1Lambda_VL
QSVLTQPPSASGTPGQRVTISCSGSSSNIGNNAVNWYQQLPGTAPKLLIYRNNQRSSGVPDRFSGSKSGTSASLAISGLRSEDEADYYCQSYDNSLSASVFGGGTKLTVL

SEQ ID NO: 298 - protein, 13 aa, Artificial Sequence
  TPP-17576_497A-M136-O21-1-hIgG1Lambda_LCDR1
SGSSSNIGNNAVN

SEQ ID NO: 299 - protein, 7 aa, Artificial Sequence
  TPP-17576_497A-M136-O21-1-hIgG1Lambda_LCDR2
RNNQRSS

SEQ ID NO: 300 - protein, 11 aa, Artificial Sequence
  TPP-17576_497A-M136-O21-1-hIgG1Lambda_LCDR3
QSYDNSLSASV

SEQ ID NO: 301 - DNA, 345 bp, Artificial Sequence
  TPP-17576_497A-M136-O21-1-hIgG1Lambda_VH
gaggtgcagctgttggagtctgggggaggcttggtacagcctggggggtccctgagactctcctgtgcagcctctggattcacctttagcagctatgccatgagctgggtccgccaggctccagggaaggggctggagtgggttggccgtattagaagcaaagctaacagttacgcgacagcatatgctgcgtcggtgaaaggcaggttcaccatctccagagacaattccaagaacacgctgtatctgcaaatgaacagcctgagagccgaggacactgccgtgtattactgtacgaggcccttggactcctggggccaaggtaccctggtcaccgtgagttca

SEQ ID NO: 302 - DNA, 15 bp, Artificial Sequence
  TPP-17576_497A-M136-O21-1-hIgG1Lambda_HCDR1
agctatgccatgagc

SEQ ID NO: 303 - DNA, 57 bp, Artificial Sequence
  TPP-17576_497A-M136-O21-1-hIgG1Lambda_HCDR2
cgtattagaagcaaagctaacagttacgcgacagcatatgctgcgtcggtgaaaggc

SEQ ID NO: 304 - DNA, 12 bp, Artificial Sequence
  TPP-17576_497A-M136-O21-1-hIgG1Lambda_HCDR3
cccttggactcc

SEQ ID NO: 305 - DNA, 330 bp, Artificial Sequence
  TPP-17576_497A-M136-O21-1-hIgG1Lambda_VL
cagtctgtgctgactcagccaccctcagcgtctgggacccccgggcagagggtcaccatctcctgttctggaagcagctccaacatcggaaataatgctgtaaactggtatcagcagctcccaggaacggcccccaaactcctcatctatagaaataatcagcggtcctcaggggtccctgaccgattctctggctccaagtctggcacctcagcctccctggccatcagtgggctccggtccgaggatgaggctgattattactgccagtcctatgacaacagcctgagtgcttcggtgttcggcggaggaaccaagctgacggtccta

SEQ ID NO: 306 - DNA, 39 bp, Artificial Sequence
  TPP-17576_497A-M136-O21-1-hIgG1Lambda_LCDR1
tctggaagcagctccaacatcggaaataatgctgtaaac

SEQ ID NO: 307 - DNA, 21 bp, Artificial Sequence
  TPP-17576_497A-M136-O21-1-hIgG1Lambda_LCDR2
agaaataatcagcggtcctca

SEQ ID NO: 308 - DNA, 33 bp, Artificial Sequence
  TPP-17576_497A-M136-O21-1-hIgG1Lambda_LCDR3
cagtcctatgacaacagcctgagtgcttcggtg

SEQ ID NO: 309 - protein, 444 aa, Artificial Sequence
  TPP-17576_497A-M136-O21-1-hIgG1Lambda_Heavy Chain
EVQLLESGGGLVQPGGSLRLSCAASGFTFSSYAMSWVRQAPGKGLEWVGRIRSKANSYATAYAASVKGRFTISRDNSKNTLYLQMNSLRAEDTAVYYCTRPLDSWGQGTLVTVSSASTKGPSVFPLAPSSKSTSGGTAALGCLVKDYFPEPVTVSWNSGALTSGVHTFPAVLQSSGLYSLSSVVTVPSSSLGTQTYICNVNHKPSNTKVDKKVEPKSCDKTHTCPPCPAPELLGGPSVFLFPPKPKDTLMISRTPEVTCVVVDVSHEDPEVKFNWYVDGVEVHNAKTKPREEQYNSTYRVVSVLTVLHQDWLNGKEYKCKVSNKALPAPIEKTISKAKGQPREPQVYTLPPSRDELTKNQVSLTCLVKGFYPSDIAVEWESNGQPENNYKTTPPVLDSDGSFFLYSKLTVDKSRWQQGNVFSCSVMHEALHNHYTQKSLSLSPG

SEQ ID NO: 310 - protein, 216 aa, Artificial Sequence
  TPP-17576_497A-M136-O21-1-hIgG1Lambda_Light Chain
QSVLTQPPSASGTPGQRVTISCSGSSSNIGNNAVNWYQQLPGTAPKLLIYRNNQRSSGVPDRFSGSKSGTSASLAISGLRSEDEADYYCQSYDNSLSASVFGGGTKLTVLGQPKAAPSVTLFPPSSEELQANKATLVCLISDFYPGAVTVAWKADSSPVKAGVETTTPSKQSNNKYAASSYLSLTPEQWKSHRSYSCQVTHEGSTVEKTVAPTECS

SEQ ID NO: 311 - protein, 115 aa, Artificial Sequence
  TPP-17577_497A-M178-K09-1-hIgG1Lambda_VH
EVQLLESGGGLLQPGGSLRLSCAASGFTFSNAWMSWVRQAPGKGLEWVAVISYDGRNKYSADSVKGRFTISRDNSKNTLYLQMNSLRAEDTAVYYCARGLPYGYWGQGTLVTVSS

SEQ ID NO: 312 - protein, 5 aa, Artificial Sequence
  TPP-17577_497A-M178-K09-1-hIgG1Lambda_HCDR1
NAWMS

SEQ ID NO: 313 - protein, 17 aa, Artificial Sequence
  TPP-17577_497A-M178-K09-1-hIgG1Lambda_HCDR2
VISYDGRNKYSADSVKG

SEQ ID NO: 314 - protein, 6 aa, Artificial Sequence
  TPP-17577_497A-M178-K09-1-hIgG1Lambda_HCDR3
GLPYGY

SEQ ID NO: 315 - protein, 110 aa, Artificial Sequence
  TPP-17577_497A-M178-K09-1-hIgG1Lambda_VL
QSVLTQPPSASGTPGQRVTISCSGSSSNIGSNTVNWYQQLPGTAPKLLIYRNNQRPSGVPDRFSGSKSGTSASLAISGLRSEDEADYYCAAWDDSLKALVFGGGTKLTVL

SEQ ID NO: 316 - protein, 13 aa, Artificial Sequence
  TPP-17577_497A-M178-K09-1-hIgG1Lambda_LCDR1
SGSSSNIGSNTVN

SEQ ID NO: 317 - protein, 7 aa, Artificial Sequence
  TPP-17577_497A-M178-K09-1-hIgG1Lambda_LCDR2
RNNQRPS

SEQ ID NO: 318 - protein, 11 aa, Artificial Sequence
  TPP-17577_497A-M178-K09-1-hIgG1Lambda_LCDR3
AAWDDSLKALV

SEQ ID NO: 319 - DNA, 345 bp, Artificial Sequence
  TPP-17577_497A-M178-K09-1-hIgG1Lambda_VH
gaggtgcagctgttggagtctgggggaggcttgttacagcctggggggtccctgagactctcctgtgcagcctctggattcaccttcagtaacgcctggatgagctgggtccgccaggctccagggaaggggctggagtgggtggcagttatatcatatgatggaagaaataaatactctgcagactccgtgaagggccgattcaccatctccagagacaattccaagaacacgctgtatctgcaaatgaacagcctgagagccgaggacactgccgtgtattactgtgcgaggggcctcccttatggctactggggccaaggtaccctggtcaccgtgagttca

SEQ ID NO: 320 - DNA, 15 bp, Artificial Sequence
  TPP-17577_497A-M178-K09-1-hIgG1Lambda_HCDR1
aacgcctggatgagc

SEQ ID NO: 321 - DNA, 51 bp, Artificial Sequence
  TPP-17577_497A-M178-K09-1-hIgG1Lambda_HCDR2
gttatatcatatgatggaagaaataaatactctgcagactccgtgaagggc

SEQ ID NO: 322 - DNA, 18 bp, Artificial Sequence
  TPP-17577_497A-M178-K09-1-hIgG1Lambda_HCDR3
ggcctcccttatggctac

SEQ ID NO: 323 - DNA, 330 bp, Artificial Sequence
  TPP-17577_497A-M178-K09-1-hIgG1Lambda_VL
cagtctgtgctgactcagccaccctcagcgtctgggacccccgggcagagggtcaccatctcttgttctggaagcagctccaacatcggaagtaatactgtaaactggtatcagcagctcccaggaacggcccccaaactcctcatctataggaataatcagcggccctcaggggtccctgaccgattctctggctccaagtctggcacctcagcctccctggccatcagtgggctccggtccgaggatgaggctgattattactgtgctgcatgggatgacagtctgaaggctctggtattcggcggaggaaccaagctgacggtccta

SEQ ID NO: 324 - DNA, 39 bp, Artificial Sequence
  TPP-17577_497A-M178-K09-1-hIgG1Lambda_LCDR1
tctggaagcagctccaacatcggaagtaatactgtaaac

SEQ ID NO: 325 - DNA, 21 bp, Artificial Sequence
  TPP-17577_497A-M178-K09-1-hIgG1Lambda_LCDR2
aggaataatcagcggccctca

SEQ ID NO: 326 - DNA, 33 bp, Artificial Sequence
  TPP-17577_497A-M178-K09-1-hIgG1Lambda_LCDR3
gctgcatgggatgacagtctgaaggctctggta

SEQ ID NO: 327 - protein, 444 aa, Artificial Sequence
  TPP-17577_497A-M178-K09-1-hIgG1Lambda_Heavy Chain
EVQLLESGGGLLQPGGSLRLSCAASGFTFSNAWMSWVRQAPGKGLEWVAVISYDGRNKYSADSVKGRFTISRDNSKNTLYLQMNSLRAEDTAVYYCARGLPYGYWGQGTLVTVSSASTKGPSVFPLAPSSKSTSGGTAALGCLVKDYFPEPVTVSWNSGALTSGVHTFPAVLQSSGLYSLSSVVTVPSSSLGTQTYICNVNHKPSNTKVDKKVEPKSCDKTHTCPPCPAPELLGGPSVFLFPPKPKDTLMISRTPEVTCVVVDVSHEDPEVKFNWYVDGVEVHNAKTKPREEQYNSTYRVVSVLTVLHQDWLNGKEYKCKVSNKALPAPIEKTISKAKGQPREPQVYTLPPSRDELTKNQVSLTCLVKGFYPSDIAVEWESNGQPENNYKTTPPVLDSDGSFFLYSKLTVDKSRWQQGNVFSCSVMHEALHNHYTQKSLSLSPG

SEQ ID NO: 328 - protein, 216 aa, Artificial Sequence
  TPP-17577_497A-M178-K09-1-hIgG1Lambda_Light Chain
QSVLTQPPSASGTPGQRVTISCSGSSSNIGSNTVNWYQQLPGTAPKLLIYRNNQRPSGVPDRFSGSKSGTSASLAISGLRSEDEADYYCAAWDDSLKALVFGGGTKLTVLGQPKAAPSVTLFPPSSEELQANKATLVCLISDFYPGAVTVAWKADSSPVKAGVETTTPSKQSNNKYAASSYLSLTPEQWKSHRSYSCQVTHEGSTVEKTVAPTECS

SEQ ID NO: 329 - protein, 121 aa, Artificial Sequence
  TPP-17578_497A-M128-B10-1-hIgG1Lambda_VH
EVQLLESGGGLVQPGGSLRLSCAASGFTFSNAWMSWVRQAPGKGLEWVSGINWNGGSTGYADSVKGRFTISRDNSKNTLYLQMNSLRAEDTAVYYCVRTYSGHYGPYFDNWGQGTLVTVSS

SEQ ID NO: 330 - protein, 5 aa, Artificial Sequence
  TPP-17578_497A-M128-B10-1-hIgG1Lambda_HCDR1
NAWMS

SEQ ID NO: 331 - protein, 17 aa, Artificial Sequence
  TPP-17578_497A-M128-B10-1-hIgG1Lambda_HCDR2
GINWNGGSTGYADSVKG

SEQ ID NO: 332 - protein, 12 aa, Artificial Sequence
  TPP-17578_497A-M128-B10-1-hIgG1Lambda_HCDR3
TYSGHYGPYFDN

SEQ ID NO: 333 - protein, 110 aa, Artificial Sequence
  TPP-17578_497A-M128-B10-1-hIgG1Lambda_VL
QSVLTQPPSASGTPGQRVTISCSGSSSNIGSHTVNWYQQLPGTAPKLLIYRNNQRPSGVPDRFSGSKSGTSASLAISGLRSEDEADYYCAAWDDSLNGWVFGGGTKLTVL

SEQ ID NO: 334 - protein, 13 aa, Artificial Sequence
  TPP-17578_497A-M128-B10-1-hIgG1Lambda_LCDR1
SGSSSNIGSHTVN

SEQ ID NO: 335 - protein, 7 aa, Artificial Sequence
  TPP-17578_497A-M128-B10-1-hIgG1Lambda_LCDR2
RNNQRPS

SEQ ID NO: 336 - protein, 11 aa, Artificial Sequence
  TPP-17578_497A-M128-B10-1-hIgG1Lambda_LCDR3
AAWDDSLNGWV

SEQ ID NO: 337 - DNA, 363 bp, Artificial Sequence
  TPP-17578_497A-M128-B10-1-hIgG1Lambda_VH
gaggtgcagctgttggagtctgggggaggcttggtacagcctggggggtccctgagactctcctgtgcagcctctggattcaccttcagtaacgcctggatgagctgggtccgccaggctccagggaaggggctggagtgggtctctggtattaattggaatggtggtagcacaggttatgcagactctgtgaagggccgattcaccatctccagagacaattccaagaacacgctgtatctgcaaatgaacagcctgagagccgaggacactgccgtgtattactgtgttaggacgtatagtgggcactacggaccctactttgacaactggggccaaggtaccctggtcaccgtgagttca

SEQ ID NO: 338 - DNA, 15 bp, Artificial Sequence
  TPP-17578_497A-M128-B10-1-hIgG1Lambda_HCDR1
aacgcctggatgagc

SEQ ID NO: 339 - DNA, 51 bp, Artificial Sequence
  TPP-17578_497A-M128-B10-1-hIgG1Lambda_HCDR2
ggtattaattggaatggtggtagcacaggttatgcagactctgtgaagggc

SEQ ID NO: 340 - DNA, 36 bp, Artificial Sequence
  TPP-17578_497A-M128-B10-1-hIgG1Lambda_HCDR3
acgtatagtgggcactacggaccctactttgacaac

SEQ ID NO: 341 - DNA, 330 bp, Artificial Sequence
  TPP-17578_497A-M128-B10-1-hIgG1Lambda_VL
cagtctgtgctgactcagccaccctcagcgtctgggacccccgggcagagggtcaccatctcttgttctggaagcagctccaacatcggaagtcatactgtaaactggtatcagcagctcccaggaacggcccccaaactcctcatctataggaataatcagcggccctcaggggtccctgaccgattctctggctccaagtctggcacctcagcctccctggccatcagtgggctccggtccgaggatgaggctgattattactgtgcagcatgggatgacagcctgaatggttgggtgttcggcggaggaaccaagctgacggtccta

SEQ ID NO: 342 - DNA, 39 bp, Artificial Sequence
  TPP-17578_497A-M128-B10-1-hIgG1Lambda_LCDR1
tctggaagcagctccaacatcggaagtcatactgtaaac

SEQ ID NO: 343 - DNA, 21 bp, Artificial Sequence
  TPP-17578_497A-M128-B10-1-hIgG1Lambda_LCDR2
aggaataatcagcggccctca

SEQ ID NO: 344 - DNA, 33 bp, Artificial Sequence
  TPP-17578_497A-M128-B10-1-hIgG1Lambda_LCDR3
gcagcatgggatgacagcctgaatggttgggtg

SEQ ID NO: 345 - protein, 450 aa, Artificial Sequence
  TPP-17578_497A-M128-B10-1-hIgG1Lambda_Heavy Chain
EVQLLESGGGLVQPGGSLRLSCAASGFTFSNAWMSWVRQAPGKGLEWVSGINWNGGSTGYADSVKGRFTISRDNSKNTLYLQMNSLRAEDTAVYYCVRTYSGHYGPYFDNWGQGTLVTVSSASTKGPSVFPLAPSSKSTSGGTAALGCLVKDYFPEPVTVSWNSGALTSGVHTFPAVLQSSGLYSLSSVVTVPSSSLGTQTYICNVNHKPSNTKVDKKVEPKSCDKTHTCPPCPAPELLGGPSVFLFPPKPKDTLMISRTPEVTCVVVDVSHEDPEVKFNWYVDGVEVHNAKTKPREEQYNSTYRVVSVLTVLHQDWLNGKEYKCKVSNKALPAPIEKTISKAKGQPREPQVYTLPPSRDELTKNQVSLTCLVKGFYPSDIAVEWESNGQPENNYKTTPPVLDSDGSFFLYSKLTVDKSRWQQGNVFSCSVMHEALHNHYTQKSLSLSPG

SEQ ID NO: 346 - protein, 216 aa, Artificial Sequence
  TPP-17578_497A-M128-B10-1-hIgG1Lambda_Light Chain
QSVLTQPPSASGTPGQRVTISCSGSSSNIGSHTVNWYQQLPGTAPKLLIYRNNQRPSGVPDRFSGSKSGTSASLAISGLRSEDEADYYCAAWDDSLNGWVFGGGTKLTVLGQPKAAPSVTLFPPSSEELQANKATLVCLISDFYPGAVTVAWKADSSPVKAGVETTTPSKQSNNKYAASSYLSLTPEQWKSHRSYSCQVTHEGSTVEKTVAPTECS

SEQ ID NO: 347 - protein, 121 aa, Artificial Sequence
  TPP-17579_497A-M180-K04-1-hIgG1Lambda_VH
EVQLLESGGGLVQPGGSLRLSCAASGFTFVTYWMTWVRQAPGKGLEWVSGVSWNGSRTHYVDSVKRRFTISRDNSKNTLYLQMNSLRAEDTAVYYCARYSGYPDYYGMDVWGQGTLVTVSS

SEQ ID NO: 348 - protein, 5 aa, Artificial Sequence
  TPP-17579_497A-M180-K04-1-hIgG1Lambda_HCDR1
TYWMT

SEQ ID NO: 349 - protein, 17 aa, Artificial Sequence
  TPP-17579_497A-M180-K04-1-hIgG1Lambda_HCDR2
GVSWNGSRTHYVDSVKR

SEQ ID NO: 350 - protein, 12 aa, Artificial Sequence
  TPP-17579_497A-M180-K04-1-hIgG1Lambda_HCDR3
YSGYPDYYGMDV

SEQ ID NO: 351 - protein, 110 aa, Artificial Sequence
  TPP-17579_497A-M180-K04-1-hIgG1Lambda_VL
QSVLTQPPSASGTPGQRVTISCSGSWSNIGNDNVYWYQQLPGTAPKLLIYRNNQRPSGVPDRFSGSKSGTSASLAISGLRSEDEADYYCQSYDRSLSGSVFGGGTKLTVL

SEQ ID NO: 352 - protein, 13 aa, Artificial Sequence
  TPP-17579_497A-M180-K04-1-hIgG1Lambda_LCDR1
SGSWSNIGNDNVY

SEQ ID NO: 353 - protein, 7 aa, Artificial Sequence
  TPP-17579_497A-M180-K04-1-hIgG1Lambda_LCDR2
RNNQRPS

SEQ ID NO: 354 - protein, 11 aa, Artificial Sequence
  TPP-17579_497A-M180-K04-1-hIgG1Lambda_LCDR3
QSYDRSLSGSV

SEQ ID NO: 355 - DNA, 363 bp, Artificial Sequence
  TPP-17579_497A-M180-K04-1-hIgG1Lambda_VH
gaggtgcaactgttggagtctgggggaggcttggtacagcctggggggtccctgagactctcctgtgcagcctctggattcacctttgttacatattggatgacctgggtccgccaggctccagggaaggggctggagtgggtatcgggtgttagttggaatggcagtaggacgcactatgtggactccgtgaagcgccgattcaccatctccagagacaattccaagaacacgctgtatctgcaaatgaacagcctgagagccgaggacactgccgtgtattactgtgcgagatatagtggctaccctgactactacggtatggacgtctggggccaaggtaccctggtcaccgtgagttca

SEQ ID NO: 356 - DNA, 15 bp, Artificial Sequence
  TPP-17579_497A-M180-K04-1-hIgG1Lambda_HCDR1
acatattggatgacc

SEQ ID NO: 357 - DNA, 51 bp, Artificial Sequence
  TPP-17579_497A-M180-K04-1-hIgG1Lambda_HCDR2
ggtgttagttggaatggcagtaggacgcactatgtggactccgtgaagcgc

SEQ ID NO: 358 - DNA, 36 bp, Artificial Sequence
  TPP-17579_497A-M180-K04-1-hIgG1Lambda_HCDR3
tatagtggctaccctgactactacggtatggacgtc

SEQ ID NO: 359 - DNA, 330 bp, Artificial Sequence
  TPP-17579_497A-M180-K04-1-hIgG1Lambda_VL
cagtctgtgctgactcagccaccctcagcgtctgggacccccgggcagagggtcaccatctcttgttctggaagctggtccaacatcggaaatgataatgtatactggtatcagcagctcccaggaacggcccccaaactcctcatctataggaataatcagcggccctcaggggtccctgaccgattctctggctccaagtctggcacctcagcctccctggccatcagtgggctccggtccgaggatgaggctgattattactgccagtcttatgacaggagcctgagtggttcggtgttcggcggaggaaccaagctgacggtccta

SEQ ID NO: 360 - DNA, 39 bp, Artificial Sequence
  TPP-17579_497A-M180-K04-1-hIgG1Lambda_LCDR1
tctggaagctggtccaacatcggaaatgataatgtatac

SEQ ID NO: 361 - DNA, 21 bp, Artificial Sequence
  TPP-17579_497A-M180-K04-1-hIgG1Lambda_LCDR2
aggaataatcagcggccctca

SEQ ID NO: 362 - DNA, 33 bp, Artificial Sequence
  TPP-17579_497A-M180-K04-1-hIgG1Lambda_LCDR3
cagtcttatgacaggagcctgagtggttcggtg

SEQ ID NO: 363 - protein, 450 aa, Artificial Sequence
  TPP-17579_497A-M180-K04-1-hIgG1Lambda_Heavy Chain
EVQLLESGGGLVQPGGSLRLSCAASGFTFVTYWMTWVRQAPGKGLEWVSGVSWNGSRTHYVDSVKRRFTISRDNSKNTLYLQMNSLRAEDTAVYYCARYSGYPDYYGMDVWGQGTLVTVSSASTKGPSVFPLAPSSKSTSGGTAALGCLVKDYFPEPVTVSWNSGALTSGVHTFPAVLQSSGLYSLSSVVTVPSSSLGTQTYICNVNHKPSNTKVDKKVEPKSCDKTHTCPPCPAPELLGGPSVFLFPPKPKDTLMISRTPEVTCVVVDVSHEDPEVKFNWYVDGVEVHNAKTKPREEQYNSTYRVVSVLTVLHQDWLNGKEYKCKVSNKALPAPIEKTISKAKGQPREPQVYTLPPSRDELTKNQVSLTCLVKGFYPSDIAVEWESNGQPENNYKTTPPVLDSDGSFFLYSKLTVDKSRWQQGNVFSCSVMHEALHNHYTQKSLSLSPG

SEQ ID NO: 364 - protein, 216 aa, Artificial Sequence
  TPP-17579_497A-M180-K04-1-hIgG1Lambda_Light Chain
QSVLTQPPSASGTPGQRVTISCSGSWSNIGNDNVYWYQQLPGTAPKLLIYRNNQRPSGVPDRFSGSKSGTSASLAISGLRSEDEADYYCQSYDRSLSGSVFGGGTKLTVLGQPKAAPSVTLFPPSSEELQANKATLVCLISDFYPGAVTVAWKADSSPVKAGVETTTPSKQSNNKYAASSYLSLTPEQWKSHRSYSCQVTHEGSTVEKTVAPTECS

SEQ ID NO: 365 - protein, 120 aa, Artificial Sequence
  TPP-17580_497A-M193-A08-1-hIgG1Lambda_VH
EVQLLESGGGLVQPGGSLRLSCAASGFTFSSYGMHWVRQAPGKGLEWVSGVSWNGSRTRYADSVKGRFTISRDNSKNTLYLQMNSLRAEDTAVYYCTRGSYNSGWYAVSWGQGTLVTVSS

SEQ ID NO: 366 - protein, 5 aa, Artificial Sequence
  TPP-17580_497A-M193-A08-1-hIgG1Lambda_HCDR1
SYGMH

SEQ ID NO: 367 - protein, 17 aa, Artificial Sequence
  TPP-17580_497A-M193-A08-1-hIgG1Lambda_HCDR2
GVSWNGSRTRYADSVKG

SEQ ID NO: 368 - protein, 11 aa, Artificial Sequence
  TPP-17580_497A-M193-A08-1-hIgG1Lambda_HCDR3
GSYNSGWYAVS

SEQ ID NO: 369 - protein, 109 aa, Artificial Sequence
  TPP-17580_497A-M193-A08-1-hIgG1Lambda_VL
QSVLTQPPSASGTPGQRVTISCSGSSSNIGSYPVNWYQQLPGTAPKLLIYRNNQRPSGVPDRFSGSKSGTSASLAISGLRSEDEADYYCSSYSVTDNLIFGGGTKLTVL

SEQ ID NO: 370 - protein, 13 aa, Artificial Sequence
  TPP-17580_497A-M193-A08-1-hIgG1Lambda_LCDR1
SGSSSNIGSYPVN

SEQ ID NO: 371 - protein, 7 aa, Artificial Sequence
  TPP-17580_497A-M193-A08-1-hIgG1Lambda_LCDR2
RNNQRPS

SEQ ID NO: 372 - protein, 10 aa, Artificial Sequence
  TPP-17580_497A-M193-A08-1-hIgG1Lambda_LCDR3
SSYSVTDNLI

SEQ ID NO: 373 - DNA, 360 bp, Artificial Sequence
  TPP-17580_497A-M193-A08-1-hIgG1Lambda_VH
gaggtgcagctgttggagtctgggggaggcttggtacagcctggggggtccctgagactctcctgtgcagcctctggattcaccttcagtagctatggcatgcactgggtccgccaggctccaggcaaggggctggagtgggtatcgggtgttagttggaatggcagtaggacgcgctatgcggactctgtgaagggccgattcaccatctccagagacaattccaagaacacgctgtatctgcaaatgaacagcctgagagccgaggacactgccgtgtattactgtactagagggtcatataatagtggctggtacgcggtctcctggggccaaggtaccctggtcaccgtgagttca

SEQ ID NO: 374 - DNA, 15 bp, Artificial Sequence
  TPP-17580_497A-M193-A08-1-hIgG1Lambda_HCDR1
agctatggcatgcac

SEQ ID NO: 375 - DNA, 51 bp, Artificial Sequence
  TPP-17580_497A-M193-A08-1-hIgG1Lambda_HCDR2
ggtgttagttggaatggcagtaggacgcgctatgcggactctgtgaagggc

SEQ ID NO: 376 - DNA, 33 bp, Artificial Sequence
  TPP-17580_497A-M193-A08-1-hIgG1Lambda_HCDR3
gggtcatataatagtggctggtacgcggtctcc

SEQ ID NO: 377 - DNA, 327 bp, Artificial Sequence
  TPP-17580_497A-M193-A08-1-hIgG1Lambda_VL
cagtctgtgctgactcagccaccctcagcgtctgggacccctgggcagagggtcaccatctcttgttctggaagcagttccaacatcgggagttatcctgtaaactggtatcagcagctcccaggaacggcccccaaactcctcatctataggaataatcagcggccctcaggggtccctgaccgattctctggctccaagtctggcacctcagcctccctggccatcagtgggctccggtccgaggatgaggctgattattactgcagctcatattctgtcaccgacaatttgatattcggcggaggaaccaagctgacggtccta

SEQ ID NO: 378 - DNA, 39 bp, Artificial Sequence
  TPP-17580_497A-M193-A08-1-hIgG1Lambda_LCDR1
tctggaagcagttccaacatcgggagttatcctgtaaac

SEQ ID NO: 379 - DNA, 21 bp, Artificial Sequence
  TPP-17580_497A-M193-A08-1-hIgG1Lambda_LCDR2
aggaataatcagcggccctca

SEQ ID NO: 380 - DNA, 30 bp, Artificial Sequence
  TPP-17580_497A-M193-A08-1-hIgG1Lambda_LCDR3
agctcatattctgtcaccgacaatttgata

SEQ ID NO: 381 - protein, 449 aa, Artificial Sequence
  TPP-17580_497A-M193-A08-1-hIgG1Lambda_Heavy Chain
EVQLLESGGGLVQPGGSLRLSCAASGFTFSSYGMHWVRQAPGKGLEWVSGVSWNGSRTRYADSVKGRFTISRDNSKNTLYLQMNSLRAEDTAVYYCTRGSYNSGWYAVSWGQGTLVTVSSASTKGPSVFPLAPSSKSTSGGTAALGCLVKDYFPEPVTVSWNSGALTSGVHTFPAVLQSSGLYSLSSVVTVPSSSLGTQTYICNVNHKPSNTKVDKKVEPKSCDKTHTCPPCPAPELLGGPSVFLFPPKPKDTLMISRTPEVTCVVVDVSHEDPEVKFNWYVDGVEVHNAKTKPREEQYNSTYRVVSVLTVLHQDWLNGKEYKCKVSNKALPAPIEKTISKAKGQPREPQVYTLPPSRDELTKNQVSLTCLVKGFYPSDIAVEWESNGQPENNYKTTPPVLDSDGSFFLYSKLTVDKSRWQQGNVFSCSVMHEALHNHYTQKSLSLSPG

SEQ ID NO: 382 - protein, 215 aa, Artificial Sequence
  TPP-17580_497A-M193-A08-1-hIgG1Lambda_Light Chain
QSVLTQPPSASGTPGQRVTISCSGSSSNIGSYPVNWYQQLPGTAPKLLIYRNNQRPSGVPDRFSGSKSGTSASLAISGLRSEDEADYYCSSYSVTDNLIFGGGTKLTVLGQPKAAPSVTLFPPSSEELQANKATLVCLISDFYPGAVTVAWKADSSPVKAGVETTTPSKQSNNKYAASSYLSLTPEQWKSHRSYSCQVTHEGSTVEKTVAPTECS

SEQ ID NO: 383 - protein, 122 aa, Artificial Sequence
  TPP-17581_497A-M177-L03-1-hIgG1Lambda_VH
EVQLLESGGGLVQPGGSLRLSCAASGFTFSNYRMTWVRQAPGKGLEWVSGINWNGGSTGYADSVKGRFTISRDNSKNTLYLQMNSLRAEDTAVYYCARGRFDTRGFYGFDYWGQGTLVTVSS

SEQ ID NO: 384 - protein, 5 aa, Artificial Sequence
  TPP-17581_497A-M177-L03-1-hIgG1Lambda_HCDR1
NYRMT

SEQ ID NO: 385 - protein, 17 aa, Artificial Sequence
  TPP-17581_497A-M177-L03-1-hIgG1Lambda_HCDR2
GINWNGGSTGYADSVKG

SEQ ID NO: 386 - protein, 13 aa, Artificial Sequence
  TPP-17581_497A-M177-L03-1-hIgG1Lambda_HCDR3
GRFDTRGFYGFDY

SEQ ID NO: 387 - protein, 111 aa, Artificial Sequence
  TPP-17581_497A-M177-L03-1-hIgG1Lambda_VL
QSVLTQPPSASGTPGQRVTISCTGSSSNIGAGYDVHWYQQLPGTAPKLLIYSHNQRPSGVPDRFSGSKSGTSASLAISGLRSEDEADYYCSAWDSSLSAWVFGGGTKLTVL

SEQ ID NO: 388 - protein, 14 aa, Artificial Sequence
  TPP-17581_497A-M177-L03-1-hIgG1Lambda_LCDR1
TGSSSNIGAGYDVH

SEQ ID NO: 389 - protein, 7 aa, Artificial Sequence
  TPP-17581_497A-M177-L03-1-hIgG1Lambda_LCDR2
SHNQRPS

SEQ ID NO: 390 - protein, 11 aa, Artificial Sequence
  TPP-17581_497A-M177-L03-1-hIgG1Lambda_LCDR3
SAWDSSLSAWV

SEQ ID NO: 391 - DNA, 366 bp, Artificial Sequence
  TPP-17581_497A-M177-L03-1-hIgG1Lambda_VH
gaggtgcagctgttggagtctgggggaggcttggtacagcctggggggtccctgagactctcctgtgcagcctctggattcaccttcagtaattataggatgacctgggtccgccaggctccagggaaggggctggagtgggtctctggtattaattggaatggtggtagcacaggttatgcagactctgtgaagggccgattcaccatctccagagacaattccaagaacacgctgtatctgcaaatgaacagcctgagagccgaggacactgccgtgtattactgtgccagagggcgctttgatactaggggtttttacggctttgactactggggccaaggtaccctggtcaccgtgagttca

SEQ ID NO: 392 - DNA, 15 bp, Artificial Sequence
  TPP-17581_497A-M177-L03-1-hIgG1Lambda_HCDR1
aattataggatgacc

SEQ ID NO: 393 - DNA, 51 bp, Artificial Sequence; identical to SEQ ID NO: 339
  TPP-17581_497A-M177-L03-1-hIgG1Lambda_HCDR2

SEQ ID NO: 394 - DNA, 39 bp, Artificial Sequence
  TPP-17581_497A-M177-L03-1-hIgG1Lambda_HCDR3
gggcgctttgatactaggggtttttacggctttgactac

SEQ ID NO: 395 - DNA, 333 bp, Artificial Sequence
  TPP-17581_497A-M177-L03-1-hIgG1Lambda_VL
cagtctgtgctgactcagccaccctcagcgtctgggacccccgggcagagggtcaccatctcctgcactgggagcagctccaacatcggggcaggttatgatgtacactggtatcagcagctcccaggaacggcccccaaactcctcatctatagtcataatcagcggccctcaggggtccctgaccgattctctggctccaagtctggcacctcagcctccctggccatcagtgggctccggtccgaggatgaggctgattattactgctcagcatgggacagcagcctcagtgcttgggtgttcggcggaggaaccaagctgacggtccta

SEQ ID NO: 396 - DNA, 42 bp, Artificial Sequence
  TPP-17581_497A-M177-L03-1-hIgG1Lambda_LCDR1
actgggagcagctccaacatcggggcaggttatgatgtacac

SEQ ID NO: 397 - DNA, 21 bp, Artificial Sequence
  TPP-17581_497A-M177-L03-1-hIgG1Lambda_LCDR2
agtcataatcagcggccctca

SEQ ID NO: 398 - DNA, 33 bp, Artificial Sequence
  TPP-17581_497A-M177-L03-1-hIgG1Lambda_LCDR3
tcagcatgggacagcagcctcagtgcttgggtg

SEQ ID NO: 399 - protein, 451 aa, Artificial Sequence
  TPP-17581_497A-M177-L03-1-hIgG1Lambda_Heavy Chain
EVQLLESGGGLVQPGGSLRLSCAASGFTFSNYRMTWVRQAPGKGLEWVSGINWNGGSTGYADSVKGRFTISRDNSKNTLYLQMNSLRAEDTAVYYCARGRFDTRGFYGFDYWGQGTLVTVSSASTKGPSVFPLAPSSKSTSGGTAALGCLVKDYFPEPVTVSWNSGALTSGVHTFPAVLQSSGLYSLSSVVTVPSSSLGTQTYICNVNHKPSNTKVDKKVEPKSCDKTHTCPPCPAPELLGGPSVFLFPPKPKDTLMISRTPEVTCVVVDVSHEDPEVKFNWYVDGVEVHNAKTKPREEQYNSTYRVVSVLTVLHQDWLNGKEYKCKVSNKALPAPIEKTISKAKGQPREPQVYTLPPSRDELTKNQVSLTCLVKGFYPSDIAVEWESNGQPENNYKTTPPVLDSDGSFFLYSKLTVDKSRWQQGNVFSCSVMHEALHNHYTQKSLSLSPG

SEQ ID NO: 400 - protein, 217 aa, Artificial Sequence
  TPP-17581_497A-M177-L03-1-hIgG1Lambda_Light Chain
QSVLTQPPSASGTPGQRVTISCTGSSSNIGAGYDVHWYQQLPGTAPKLLIYSHNQRPSGVPDRFSGSKSGTSASLAISGLRSEDEADYYCSAWDSSLSAWVFGGGTKLTVLGQPKAAPSVTLFPPSSEELQANKATLVCLISDFYPGAVTVAWKADSSPVKAGVETTTPSKQSNNKYAASSYLSLTPEQWKSHRSYSCQVTHEGSTVEKTVAPTECS

SEQ ID NO: 401 - protein, 122 aa, Artificial Sequence
  TPP-18205_004-F10_497A-M296-L12+497A-M326-O09-hIgG1Lambda_VH
EVQLLESGGGLVQPGGSLRLSCAASGFTFSSYAMSWVRQAPGKGLEWVSGIRWNSGSKGYAGSVKGRFTISRDNSKNTLYLQMNSLRAEDTAVYYCVRSGNYYVGYHGMDVWGQGTLVTVSS

SEQ ID NO: 402 - protein, 5 aa, Artificial Sequence
  TPP-18205_004-F10_497A-M296-L12+497A-M326-O09-hIgG1Lambda_HCDR1
SYAMS

SEQ ID NO: 403 - protein, 17 aa, Artificial Sequence
  TPP-18205_004-F10_497A-M296-L12+497A-M326-O09-hIgG1Lambda_HCDR2
GIRWNSGSKGYAGSVKG

SEQ ID NO: 404 - protein, 13 aa, Artificial Sequence
  TPP-18205_004-F10_497A-M296-L12+497A-M326-O09-hIgG1Lambda_HCDR3
SGNYYVGYHGMDV

SEQ ID NO: 405 - protein, 108 aa, Artificial Sequence
  TPP-18205_004-F10_497A-M296-L12+497A-M326-O09-hIgG1Lambda_VL
QSVLTQPPSASGTPGQRVTISCSGGNSNIGTYFVSWYQQLPGTAPKLLIYTNNQRPSGVPDRFSGSKSGTSASLAISGLRSEDEADYYCETWDSNTRVFGGGTKLTVL

SEQ ID NO: 406 - protein, 13 aa, Artificial Sequence
  TPP-18205_004-F10_497A-M296-L12+497A-M326-O09-hIgG1Lambda_LCDR1
SGGNSNIGTYFVS

SEQ ID NO: 407 - protein, 7 aa, Artificial Sequence
  TPP-18205_004-F10_497A-M296-L12+497A-M326-O09-hIgG1Lambda_LCDR2
TNNQRPS

SEQ ID NO: 408 - protein, 9 aa, Artificial Sequence
  TPP-18205_004-F10_497A-M296-L12+497A-M326-O09-hIgG1Lambda_LCDR3
ETWDSNTRV

SEQ ID NO: 409 - DNA, 366 bp, Artificial Sequence
  TPP-18205_004-F10_497A-M296-L12+497A-M326-O09-hIgG1Lambda_VH
gaagttcagctgctggaatctggcggcggactggttcaacctggcggatctctgagactgagctgtgccgccagcggcttcacctttagcagctacgccatgagctgggtccgacaggctcctggcaaaggccttgaatgggtgtccggcatcagatggaacagcggctctaagggctatgccggctctgtgaagggcagattcaccatcagccgggacaacagcaagaacaccctgtacctgcagatgaacagcctgagagccgaggacaccgccgtgtactactgtgtgcggagcggcaattactacgtgggctaccacggcatggatgtgtggggacagggaaccctggttaccgtttcttca

SEQ ID NO: 410 - DNA, 15 bp, Artificial Sequence
  TPP-18205_004-F10_497A-M296-L12+497A-M326-O09-hIgG1Lambda_HCDR1
agctacgccatgagc

SEQ ID NO: 411 - DNA, 51 bp, Artificial Sequence
  TPP-18205_004-F10_497A-M296-L12+497A-M326-O09-hIgG1Lambda_HCDR2
ggcatcagatggaacagcggctctaagggctatgccggctctgtgaagggc

SEQ ID NO: 412 - DNA, 39 bp, Artificial Sequence
  TPP-18205_004-F10_497A-M296-L12+497A-M326-O09-hIgG1Lambda_HCDR3
agcggcaattactacgtgggctaccacggcatggatgtg

SEQ ID NO: 413 - DNA, 324 bp, Artificial Sequence
  TPP-18205_004-F10_497A-M296-L12+497A-M326-O09-hIgG1Lambda_VL
cagtctgttctgacacagcctcctagcgcctctggcacacctggacagagagtgaccatcagctgtagcggcggcaacagcaacatcggcacctacttcgtgtcctggtatcagcagctgcctggcacagcccctaaactgctgatctacaccaacaaccagcggcctagcggcgtgcccgatagattttctggcagcaagagcggcacaagcgccagcctggctatctctggactgagatctgaggacgaggccgactactactgcgagacatgggacagcaacaccagagtgtttggcggaggcaccaagctgacagtgcta

SEQ ID NO: 414 - DNA, 39 bp, Artificial Sequence
  TPP-18205_004-F10_497A-M296-L12+497A-M326-O09-hIgG1Lambda_LCDR1
agcggcggcaacagcaacatcggcacctacttcgtgtcc

SEQ ID NO: 415 - DNA, 21 bp, Artificial Sequence
  TPP-18205_004-F10_497A-M296-L12+497A-M326-O09-hIgG1Lambda_LCDR2
accaacaaccagcggcctagc

SEQ ID NO: 416 - DNA, 27 bp, Artificial Sequence
  TPP-18205_004-F10_497A-M296-L12+497A-M326-O09-hIgG1Lambda_LCDR3
gagacatgggacagcaacaccagagtg

SEQ ID NO: 417 - protein, 451 aa, Artificial Sequence
  TPP-18205_004-F10_497A-M296-L12+497A-M326-O09-hIgG1Lambda_Heavy Chain
EVQLLESGGGLVQPGGSLRLSCAASGFTFSSYAMSWVRQAPGKGLEWVSGIRWNSGSKGYAGSVKGRFTISRDNSKNTLYLQMNSLRAEDTAVYYCVRSGNYYVGYHGMDVWGQGTLVTVSSASTKGPSVFPLAPSSKSTSGGTAALGCLVKDYFPEPVTVSWNSGALTSGVHTFPAVLQSSGLYSLSSVVTVPSSSLGTQTYICNVNHKPSNTKVDKKVEPKSCDKTHTCPPCPAPELLGGPSVFLFPPKPKDTLMISRTPEVTCVVVDVSHEDPEVKFNWYVDGVEVHNAKTKPREEQYNSTYRVVSVLTVLHQDWLNGKEYKCKVSNKALPAPIEKTISKAKGQPREPQVYTLPPSRDELTKNQVSLTCLVKGFYPSDIAVEWESNGQPENNYKTTPPVLDSDGSFFLYSKLTVDKSRWQQGNVFSCSVMHEALHNHYTQKSLSLSPG

SEQ ID NO: 418 - protein, 214 aa, Artificial Sequence
  TPP-18205_004-F10_497A-M296-L12+497A-M326-O09-hIgG1Lambda_Light Chain
QSVLTQPPSASGTPGQRVTISCSGGNSNIGTYFVSWYQQLPGTAPKLLIYTNNQRPSGVPDRFSGSKSGTSASLAISGLRSEDEADYYCETWDSNTRVFGGGTKLTVLGQPKAAPSVTLFPPSSEELQANKATLVCLISDFYPGAVTVAWKADSSPVKAGVETTTPSKQSNNKYAASSYLSLTPEQWKSHRSYSCQVTHEGSTVEKTVAPTECS

SEQ ID NO: 419 - protein, 122 aa, Artificial Sequence
  TPP-18206_002-F01_497A-M281-P02+497A-M317-O07-hIgG1Lambda_VH
EVQLLESGGGLVQPGGSLRLSCAASGFTFSHYGMHWVRQAPGKGLEWVSGINWNGGSTGYADSVKGRFTISRDNSKNTLYLQMNSLRAEDTAVYYCARGHHSGYDGRFFDYWGQGTLVTVSS

SEQ ID NO: 420 - protein, 5 aa, Artificial Sequence
  TPP-18206_002-F01_497A-M281-P02+497A-M317-O07-hIgG1Lambda_HCDR1
HYGMH

SEQ ID NO: 421 - protein, 17 aa, Artificial Sequence
  TPP-18206_002-F01_497A-M281-P02+497A-M317-O07-hIgG1Lambda_HCDR2
GINWNGGSTGYADSVKG

SEQ ID NO: 422 - protein, 13 aa, Artificial Sequence
  TPP-18206_002-F01_497A-M281-P02+497A-M317-O07-hIgG1Lambda_HCDR3
GHHSGYDGRFFDY

SEQ ID NO: 423 - protein, 111 aa, Artificial Sequence
  TPP-18206_002-F01_497A-M281-P02+497A-M317-O07-hIgG1Lambda_VL
QSVLTQPPSASGTPGQRVTISCTGSSSNIGAGYNVHWYQQLPGTAPKLLIYTNNRRPSGVPDRFSGSKSGTSASLAISGLRSEDEADYYCAAWDASLSGWVFGGGTKLTVL

SEQ ID NO: 424 - protein, 14 aa, Artificial Sequence
  TPP-18206_002-F01_497A-M281-P02+497A-M317-O07-hIgG1Lambda_LCDR1
TGSSSNIGAGYNVH

SEQ ID NO: 425 - protein, 7 aa, Artificial Sequence
  TPP-18206_002-F01_497A-M281-P02+497A-M317-O07-hIgG1Lambda_LCDR2
TNNRRPS

SEQ ID NO: 426 - protein, 11 aa, Artificial Sequence
  TPP-18206_002-F01_497A-M281-P02+497A-M317-O07-hIgG1Lambda_LCDR3
AAWDASLSGWV

SEQ ID NO: 427 - DNA, 366 bp, Artificial Sequence
  TPP-18206_002-F01_497A-M281-P02+497A-M317-O07-hIgG1Lambda_VH
gaagttcagctgctggaatctggcggcggactggttcaacctggcggatctctgagactgagctgtgccgccagcggcttcacctttagccactatggcatgcactgggtccgacaggcccctggcaaaggacttgaatgggtgtccggcatcaactggaatggcggctctacaggctacgccgactctgtgaagggcagattcaccatcagccgggacaacagcaagaacaccctgtacctgcagatgaactccctgagagccgaggacaccgccgtgtactattgtgccagaggccaccacagcggctacgacggcagattctttgactattggggccagggcaccctggtcacagtttcttca

SEQ ID NO: 428 - DNA, 15 bp, Artificial Sequence
  TPP-18206_002-F01_497A-M281-P02+497A-M317-O07-hIgG1Lambda_HCDR1
cactatggcatgcac

SEQ ID NO: 429 - DNA, 51 bp, Artificial Sequence
  TPP-18206_002-F01_497A-M281-P02+497A-M317-O07-hIgG1Lambda_HCDR2
ggcatcaactggaatggcggctctacaggctacgccgactctgtgaagggc

SEQ ID NO: 430 - DNA, 39 bp, Artificial Sequence
  TPP-18206_002-F01_497A-M281-P02+497A-M317-O07-hIgG1Lambda_HCDR3
ggccaccacagcggctacgacggcagattctttgactat

SEQ ID NO: 431 - DNA, 333 bp, Artificial Sequence
  TPP-18206_002-F01_497A-M281-P02+497A-M317-O07-hIgG1Lambda_VL
cagtctgttctgacacagcctcctagcgcctctggcacacctggacagagagtgaccatcagctgtaccggcagcagctccaatatcggagccggctacaacgtgcactggtatcagcagctgcctggcacagcccctaaactgctgatctacaccaacaacagacggcccagcggcgtgcccgatagattttctggcagcaagagcggcacaagcgccagcctggctatctctggactgagatctgaggacgaggccgactactattgcgccgcctgggatgcttctctgagcggatgggttttcggcggaggcaccaaactgacagtgcta

SEQ ID NO: 432 - DNA, 42 bp, Artificial Sequence
  TPP-18206_002-F01_497A-M281-P02+497A-M317-O07-hIgG1Lambda_LCDR1
accggcagcagctccaatatcggagccggctacaacgtgcac

SEQ ID NO: 433 - DNA, 21 bp, Artificial Sequence
  TPP-18206_002-F01_497A-M281-P02+497A-M317-O07-hIgG1Lambda_LCDR2
accaacaacagacggcccagc

SEQ ID NO: 434 - DNA, 33 bp, Artificial Sequence
  TPP-18206_002-F01_497A-M281-P02+497A-M317-O07-hIgG1Lambda_LCDR3
gccgcctgggatgcttctctgagcggatgggtt

SEQ ID NO: 435 - protein, 451 aa, Artificial Sequence
  TPP-18206_002-F01_497A-M281-P02+497A-M317-O07-hIgG1Lambda_Heavy Chain
EVQLLESGGGLVQPGGSLRLSCAASGFTFSHYGMHWVRQAPGKGLEWVSGINWNGGSTGYADSVKGRFTISRDNSKNTLYLQMNSLRAEDTAVYYCARGHHSGYDGRFFDYWGQGTLVTVSSASTKGPSVFPLAPSSKSTSGGTAALGCLVKDYFPEPVTVSWNSGALTSGVHTFPAVLQSSGLYSLSSVVTVPSSSLGTQTYICNVNHKPSNTKVDKKVEPKSCDKTHTCPPCPAPELLGGPSVFLFPPKPKDTLMISRTPEVTCVVVDVSHEDPEVKFNWYVDGVEVHNAKTKPREEQYNSTYRVVSVLTVLHQDWLNGKEYKCKVSNKALPAPIEKTISKAKGQPREPQVYTLPPSRDELTKNQVSLTCLVKGFYPSDIAVEWESNGQPENNYKTTPPVLDSDGSFFLYSKLTVDKSRWQQGNVFSCSVMHEALHNHYTQKSLSLSPG

SEQ ID NO: 436 - protein, 217 aa, Artificial Sequence
  TPP-18206_002-F01_497A-M281-P02+497A-M317-O07-hIgG1Lambda_Light Chain
QSVLTQPPSASGTPGQRVTISCTGSSSNIGAGYNVHWYQQLPGTAPKLLIYTNNRRPSGVPDRFSGSKSGTSASLAISGLRSEDEADYYCAAWDASLSGWVFGGGTKLTVLGQPKAAPSVTLFPPSSEELQANKATLVCLISDFYPGAVTVAWKADSSPVKAGVETTTPSKQSNNKYAASSYLSLTPEQWKSHRSYSCQVTHEGSTVEKTVAPTECS

SEQ ID NO: 437 - protein, 121 aa, Artificial Sequence
  TPP-18207_001-B08_497A-M301-B18+497A-M316-D16-hIgG1Lambda_VH
EVQLLESGGGLVQPGGSLRLSCAASGFTFSNAWMSWVRQAPGKGLEWVSGINWNGGSTGYADSVKGRFTISRDNSKNTLYLQMNSLRAEDTAVYYCARTYTGNYGPYFDYWGQGTLVTVSS

SEQ ID NO: 438 - protein, 5 aa, Artificial Sequence
  TPP-18207_001-B08_497A-M301-B18+497A-M316-D16-hIgG1Lambda_HCDR1
NAWMS

SEQ ID NO: 439 - protein, 17 aa, Artificial Sequence
  TPP-18207_001-B08_497A-M301-B18+497A-M316-D16-hIgG1Lambda_HCDR2
GINWNGGSTGYADSVKG

SEQ ID NO: 440 - protein, 12 aa, Artificial Sequence
  TPP-18207_001-B08_497A-M301-B18+497A-M316-D16-hIgG1Lambda_HCDR3
TYTGNYGPYFDY

SEQ ID NO: 441 - protein, 111 aa, Artificial Sequence
  TPP-18207_001-B08_497A-M301-B18+497A-M316-D16-hIgG1Lambda_VL
QSVLTQPPSASGTPGQRVTISCTGSSSNIGAGYDVHWYQQLPGTAPKLLIYKNNQRPSGVPDRFSGSKSGTSASLAISGLRSEDEADYYCAAWDDSLRGWVFGGGTKLTVL

SEQ ID NO: 442 - protein, 14 aa, Artificial Sequence
  TPP-18207_001-B08_497A-M301-B18+497A-M316-D16-hIgG1Lambda_LCDR1
TGSSSNIGAGYDVH

SEQ ID NO: 443 - protein, 7 aa, Artificial Sequence
  TPP-18207_001-B08_497A-M301-B18+497A-M316-D16-hIgG1Lambda_LCDR2
KNNQRPS

SEQ ID NO: 444 - protein, 11 aa, Artificial Sequence
  TPP-18207_001-B08_497A-M301-B18+497A-M316-D16-hIgG1Lambda_LCDR3
AAWDDSLRGWV

SEQ ID NO: 445 - DNA, 363 bp, Artificial Sequence
  TPP-18207_001-B08_497A-M301-B18+497A-M316-D16-hIgG1Lambda_VH
gaagttcagctgctggaatctggcggcggactggttcaacctggcggatctctgagactgagctgtgccgccagcggcttcacctttagcaatgcctggatgagctgggtccgacaggcccctggaaaaggccttgaatgggtgtccggcatcaactggaatggcggctctacaggctacgccgactctgtgaagggcagattcaccatcagccgggacaacagcaagaacaccctgtacctgcagatgaactccctgagagccgaggacaccgccgtgtactactgtgccagaacctacaccggcaactacggcccctacttcgattattggggccagggcacactggtcaccgtttcttca

SEQ ID NO: 446 - DNA, 15 bp, Artificial Sequence
  TPP-18207_001-B08_497A-M301-B18+497A-M316-D16-hIgG1Lambda_HCDR1
aatgcctggatgagc

SEQ ID NO: 447 - DNA, 51 bp, Artificial Sequence; identical to SEQ ID NO: 429
  TPP-18207_001-B08_497A-M301-B18+497A-M316-D16-hIgG1Lambda_HCDR2

SEQ ID NO: 448 - DNA, 36 bp, Artificial Sequence
  TPP-18207_001-B08_497A-M301-B18+497A-M316-D16-hIgG1Lambda_HCDR3
acctacaccggcaactacggcccctacttcgattat

SEQ ID NO: 449 - DNA, 333 bp, Artificial Sequence
  TPP-18207_001-B08_497A-M301-B18+497A-M316-D16-hIgG1Lambda_VL
cagtctgttctgacacagcctcctagcgcctctggcacacctggacagagagtgaccatcagctgtaccggcagcagctccaatatcggagccggctatgacgtgcactggtatcagcagctgcctggcacagcccctaaactgctgatctacaagaacaaccagcggcctagcggcgtgcccgatagattttctggcagcaagagcggcacaagcgccagcctggctatctctggactgagatctgaggacgaggccgactactattgcgccgcctgggatgattctctgagaggctgggttttcggcggaggcaccaaactgacagtgcta

SEQ ID NO: 450 - DNA, 42 bp, Artificial Sequence
  TPP-18207_001-B08_497A-M301-B18+497A-M316-D16-hIgG1Lambda_LCDR1
accggcagcagctccaatatcggagccggctatgacgtgcac

SEQ ID NO: 451 - DNA, 21 bp, Artificial Sequence
  TPP-18207_001-B08_497A-M301-B18+497A-M316-D16-hIgG1Lambda_LCDR2
aagaacaaccagcggcctagc

SEQ ID NO: 452 - DNA, 33 bp, Artificial Sequence
  TPP-18207_001-B08_497A-M301-B18+497A-M316-D16-hIgG1Lambda_LCDR3
gccgcctgggatgattctctgagaggctgggtt

SEQ ID NO: 453 - protein, 450 aa, Artificial Sequence
  TPP-18207_001-B08_497A-M301-B18+497A-M316-D16-hIgG1Lambda_Heavy Chain
EVQLLESGGGLVQPGGSLRLSCAASGFTFSNAWMSWVRQAPGKGLEWVSGINWNGGSTGYADSVKGRFTISRDNSKNTLYLQMNSLRAEDTAVYYCARTYTGNYGPYFDYWGQGTLVTVSSASTKGPSVFPLAPSSKSTSGGTAALGCLVKDYFPEPVTVSWNSGALTSGVHTFPAVLQSSGLYSLSSVVTVPSSSLGTQTYICNVNHKPSNTKVDKKVEPKSCDKTHTCPPCPAPELLGGPSVFLFPPKPKDTLMISRTPEVTCVVVDVSHEDPEVKFNWYVDGVEVHNAKTKPREEQYNSTYRVVSVLTVLHQDWLNGKEYKCKVSNKALPAPIEKTISKAKGQPREPQVYTLPPSRDELTKNQVSLTCLVKGFYPSDIAVEWESNGQPENNYKTTPPVLDSDGSFFLYSKLTVDKSRWQQGNVFSCSVMHEALHNHYTQKSLSLSPG

SEQ ID NO: 454 - protein, 217 aa, Artificial Sequence
  TPP-18207_001-B08_497A-M301-B18+497A-M316-D16-hIgG1Lambda_Light Chain
QSVLTQPPSASGTPGQRVTISCTGSSSNIGAGYDVHWYQQLPGTAPKLLIYKNNQRPSGVPDRFSGSKSGTSASLAISGLRSEDEADYYCAAWDDSLRGWVFGGGTKLTVLGQPKAAPSVTLFPPSSEELQANKATLVCLISDFYPGAVTVAWKADSSPVKAGVETTTPSKQSNNKYAASSYLSLTPEQWKSHRSYSCQVTHEGSTVEKTVAPTECS

SEQ ID NO: 455 - protein, 121 aa, Artificial Sequence
  TPP-19546_17578-gl33-hIgG1Lambda_VH
EVQLLESGGGLVQPGGSLRLSCAASGFTFSSAWMSWVRQAPGKGLEWVSGISWSGGSTGYADSVKGRFTISRDNSKNTLYLQMNSLRAEDTAVYYCARTYSGHYGPYFDYWGQGTLVTVSS

SEQ ID NO: 456 - protein, 5 aa, Artificial Sequence
  TPP-19546_17578-gl33-hIgG1Lambda_HCDR1
SAWMS

SEQ ID NO: 457 - protein, 17 aa, Artificial Sequence
  TPP-19546_17578-gl33-hIgG1Lambda_HCDR2
GISWSGGSTGYADSVKG

SEQ ID NO: 458 - protein, 12 aa, Artificial Sequence
  TPP-19546_17578-gl33-hIgG1Lambda_HCDR3
TYSGHYGPYFDY

SEQ ID NO: 459 - protein, 110 aa, Artificial Sequence; identical to SEQ ID NO: 333
  TPP-19546_17578-gl33-hIgG1Lambda_VL

SEQ ID NO: 460 - protein, 13 aa, Artificial Sequence
  TPP-19546_17578-gl33-hIgG1Lambda_LCDR1
SGSSSNIGSHTVN

SEQ ID NO: 461 - protein, 7 aa, Artificial Sequence
  TPP-19546_17578-gl33-hIgG1Lambda_LCDR2
RNNQRPS

SEQ ID NO: 462 - protein, 11 aa, Artificial Sequence
  TPP-19546_17578-gl33-hIgG1Lambda_LCDR3
AAWDDSLNGWV

SEQ ID NO: 463 - DNA, 363 bp, Artificial Sequence
  TPP-19546_17578-gl33-hIgG1Lambda_VH
gaagttcagctgctggaatctggcggcggactggttcaacctggcggatctctgagactgagctgtgccgccagcggcttcacattttctagcgcctggatgagctgggtccgacaggctcctggaaaaggcctggaatgggtgtccggcatctcttggagcggcggctctacaggctatgccgattctgtgaagggcagattcaccatcagccgggacaacagcaagaacaccctgtacctgcagatgaactccctgagagccgaggacaccgccgtgtactactgtgccagaacatacagcggccactacggcccctacttcgattattggggccagggcacactggtcaccgtttcttca

SEQ ID NO: 464 - DNA, 15 bp, Artificial Sequence
  TPP-19546_17578-gl33-hIgG1Lambda_HCDR1
agcgcctggatgagc

SEQ ID NO: 465 - DNA, 51 bp, Artificial Sequence
  TPP-19546_17578-gl33-hIgG1Lambda_HCDR2
ggcatctcttggagcggcggctctacaggctatgccgattctgtgaagggc

SEQ ID NO: 466 - DNA, 36 bp, Artificial Sequence
  TPP-19546_17578-gl33-hIgG1Lambda_HCDR3
acatacagcggccactacggcccctacttcgattat

SEQ ID NO: 467 - DNA, 330 bp, Artificial Sequence; identical to SEQ ID NO: 341
  TPP-19546_17578-gl33-hIgG1Lambda_VL

SEQ ID NO: 468 - DNA, 39 bp, Artificial Sequence; identical to SEQ ID NO: 342
  TPP-19546_17578-gl33-hIgG1Lambda_LCDR1

SEQ ID NO: 469 - DNA, 21 bp, Artificial Sequence
  TPP-19546_17578-gl33-hIgG1Lambda_LCDR2
aggaataatcagcggccctca

SEQ ID NO: 470 - DNA, 33 bp, Artificial Sequence; identical to SEQ ID NO: 344
  TPP-19546_17578-gl33-hIgG1Lambda_LCDR3

SEQ ID NO: 471 - protein, 450 aa, Artificial Sequence
  TPP-19546_17578-gl33-hIgG1Lambda_Heavy Chain
EVQLLESGGGLVQPGGSLRLSCAASGFTFSSAWMSWVRQAPGKGLEWVSGISWSGGSTGYADSVKGRFTISRDNSKNTLYLQMNSLRAEDTAVYYCARTYSGHYGPYFDYWGQGTLVTVSSASTKGPSVFPLAPSSKSTSGGTAALGCLVKDYFPEPVTVSWNSGALTSGVHTFPAVLQSSGLYSLSSVVTVPSSSLGTQTYICNVNHKPSNTKVDKKVEPKSCDKTHTCPPCPAPELLGGPSVFLFPPKPKDTLMISRTPEVTCVVVDVSHEDPEVKFNWYVDGVEVHNAKTKPREEQYNSTYRVVSVLTVLHQDWLNGKEYKCKVSNKALPAPIEKTISKAKGQPREPQVYTLPPSRDELTKNQVSLTCLVKGFYPSDIAVEWESNGQPENNYKTTPPVLDSDGSFFLYSKLTVDKSRWQQGNVFSCSVMHEALHNHYTQKSLSLSPG

SEQ ID NO: 472 - protein, 216 aa, Artificial Sequence; identical to SEQ ID NO: 346
  TPP-19546_17578-gl33-hIgG1Lambda_Light Chain

SEQ ID NO: 473 - protein, 122 aa, Artificial Sequence
  TPP-20950_18206-gl-42-hIgG1wt-Lambda_VH
EVQLLESGGGLVQPGGSLRLSCAASGFTFSSYGMHWVRQAPGKGLEWVSAIKWGGGSHGYADSVKGRFTISRDNSKNTLYLQMNSLRAEDTAVYYCARGHHSGKDGRFFDYWGQGTLVTVSS

SEQ ID NO: 474 - protein, 5 aa, Artificial Sequence
  TPP-20950_18206-gl-42-hIgG1wt-Lambda_HCDR1
SYGMH

SEQ ID NO: 475 - protein, 17 aa, Artificial Sequence
  TPP-20950_18206-gl-42-hIgG1wt-Lambda_HCDR2
AIKWGGGSHGYADSVKG

SEQ ID NO: 476 - protein, 13 aa, Artificial Sequence
  TPP-20950_18206-gl-42-hIgG1wt-Lambda_HCDR3
GHHSGKDGRFFDY

SEQ ID NO: 477 - protein, 111 aa, Artificial Sequence
  TPP-20950_18206-gl-42-hIgG1wt-Lambda_VL
QSVLTQPPSVSGAPGQRVTISCTGSSSNIGAGYNVHWYQQLPGTAPKLLIYTNNRRPSGVPDRFSGSKSGTSASLAISGLRSEDEADYYCAAWDASLSGWVFGGGTKLTVL

SEQ ID NO: 478 - protein, 14 aa, Artificial Sequence
  TPP-20950_18206-gl-42-hIgG1wt-Lambda_LCDR1
TGSSSNIGAGYNVH

SEQ ID NO: 479 - protein, 7 aa, Artificial Sequence
  TPP-20950_18206-gl-42-hIgG1wt-Lambda_LCDR2
TNNRRPS

SEQ ID NO: 480 - protein, 11 aa, Artificial Sequence
  TPP-20950_18206-gl-42-hIgG1wt-Lambda_LCDR3
AAWDASLSGWV

SEQ ID NO: 481 - DNA, 366 bp, Artificial Sequence
  TPP-20950_18206-gl-42-hIgG1wt-Lambda_VH
gaagttcagctgctggaatctggcggcggactggttcaacctggcggatctctgagactgagctgtgccgccagcggcttcacctttagcagctatggcatgcactgggtccgacaggcccctggcaaaggacttgaatgggtgtccgccattaagtggggcggaggctctcacggctatgccgattctgtgaagggcagattcaccatcagccgggacaacagcaagaacaccctgtacctgcagatgaacagcctgagagccgaggacaccgccgtgtactattgtgccagaggccaccactctggcaaggacggcagattcttcgactattggggccagggcaccctggtcacagtttcttca

SEQ ID NO: 482 - DNA, 15 bp, Artificial Sequence
  TPP-20950_18206-gl-42-hIgG1wt-Lambda_HCDR1
agctatggcatgcac

SEQ ID NO: 483 - DNA, 51 bp, Artificial Sequence
  TPP-20950_18206-gl-42-hIgG1wt-Lambda_HCDR2
gccattaagtggggcggaggctctcacggctatgccgattctgtgaagggc

SEQ ID NO: 484 - DNA, 39 bp, Artificial Sequence
  TPP-20950_18206-gl-42-hIgG1wt-Lambda_HCDR3
ggccaccactctggcaaggacggcagattcttcgactat

SEQ ID NO: 485 - DNA, 333 bp, Artificial Sequence
  TPP-20950_18206-gl-42-hIgG1wt-Lambda_VL
cagtctgttctgacacagcctccatctgtgtctggcgcccctggacagagagtgaccatcagctgtacaggcagcagctccaatatcggagccggctacaacgtgcactggtatcagcagctgcctggcacagcccctaaactgctgatctacaccaacaacagacggcccagcggcgtgcccgatagattttctggcagcaagagcggcacaagcgccagcctggctatctctggactgagatctgaggacgaggccgactactattgcgccgcctgggatgcttctctgagcggatgggttttcggcggaggcaccaaactgacagtgcta

SEQ ID NO: 486 - DNA, 42 bp, Artificial Sequence
  TPP-20950_18206-gl-42-hIgG1wt-Lambda_LCDR1
acaggcagcagctccaatatcggagccggctacaacgtgcac

SEQ ID NO: 487 - DNA, 21 bp, Artificial Sequence
  TPP-20950_18206-gl-42-hIgG1wt-Lambda_LCDR2
accaacaacagacggcccagc

SEQ ID NO: 488 - DNA, 33 bp, Artificial Sequence; identical to SEQ ID NO: 434
  TPP-20950_18206-gl-42-hIgG1wt-Lambda_LCDR3

SEQ ID NO: 489 - protein, 452 aa, Artificial Sequence
  TPP-20950_18206-gl-42-hIgG1wt-Lambda_Heavy Chain
EVQLLESGGGLVQPGGSLRLSCAASGFTFSSYGMHWVRQAPGKGLEWVSAIKWGGGSHGYADSVKGRFTISRDNSKNTLYLQMNSLRAEDTAVYYCARGHHSGKDGRFFDYWGQGTLVTVSSASTKGPSVFPLAPSSKSTSGGTAALGCLVKDYFPEPVTVSWNSGALTSGVHTFPAVLQSSGLYSLSSVVTVPSSSLGTQTYICNVNHKPSNTKVDKKVEPKSCDKTHTCPPCPAPELLGGPSVFLFPPKPKDTLMISRTPEVTCVVVDVSHEDPEVKFNWYVDGVEVHNAKTKPREEQYNSTYRVVSVLTVLHQDWLNGKEYKCKVSNKALPAPIEKTISKAKGQPREPQVYTLPPSRDELTKNQVSLTCLVKGFYPSDIAVEWESNGQPENNYKTTPPVLDSDGSFFLYSKLTVDKSRWQQGNVFSCSVMHEALHNHYTQKSLSLSPGK

SEQ ID NO: 490 - protein, 217 aa, Artificial Sequence
  TPP-20950_18206-gl-42-hIgG1wt-Lambda_Light Chain
QSVLTQPPSVSGAPGQRVTISCTGSSSNIGAGYNVHWYQQLPGTAPKLLIYTNNRRPSGVPDRFSGSKSGTSASLAISGLRSEDEADYYCAAWDASLSGWVFGGGTKLTVLGQPKAAPSVTLFPPSSEELQANKATLVCLISDFYPGAVTVAWKADSSPVKAGVETTTPSKQSNNKYAASSYLSLTPEQWKSHRSYSCQVTHEGSTVEKTVAPTECS

SEQ ID NO: 491 - protein, 122 aa, Artificial Sequence
  TPP-20955_18206-gl-47-hIgG1wt-Lambda_VH
EVQLLESGGGLVQPGGSLRLSCAASGFTFSSYGMHWVRQAPGKGLEWVSAIKWGGGSHGYADSVKGRFTISRDNSKNTLYLQMNSLRAEDTAVYYCARGHHKGYDGRFFDYWGQGTLVTVSS

SEQ ID NO: 492 - protein, 5 aa, Artificial Sequence
  TPP-20955_18206-gl-47-hIgG1wt-Lambda_HCDR1
SYGMH

SEQ ID NO: 493 - protein, 17 aa, Artificial Sequence
  TPP-20955_18206-gl-47-hIgG1wt-Lambda_HCDR2
AIKWGGGSHGYADSVKG

SEQ ID NO: 494 - protein, 13 aa, Artificial Sequence
  TPP-20955_18206-gl-47-hIgG1wt-Lambda_HCDR3
GHHKGYDGRFFDY

SEQ ID NO: 495 - protein, 111 aa, Artificial Sequence; identical to SEQ ID NO: 477
  TPP-20955_18206-gl-47-hIgG1wt-Lambda_VL

SEQ ID NO: 496 - protein, 14 aa, Artificial Sequence
  TPP-20955_18206-gl-47-hIgG1wt-Lambda_LCDR1
TGSSSNIGAGYNVH

SEQ ID NO: 497 - protein, 7 aa, Artificial Sequence
  TPP-20955_18206-gl-47-hIgG1wt-Lambda_LCDR2
TNNRRPS

SEQ ID NO: 498 - protein, 11 aa, Artificial Sequence
  TPP-20955_18206-gl-47-hIgG1wt-Lambda_LCDR3
AAWDASLSGWV

SEQ ID NO: 499 - DNA, 366 bp, Artificial Sequence
  TPP-20955_18206-gl-47-hIgG1wt-Lambda_VH
gaagttcagctgctggaatctggcggcggactggttcaacctggcggatctctgagactgagctgtgccgccagcggcttcacctttagcagctatggcatgcactgggtccgacaggcccctggcaaaggacttgaatgggtgtccgccattaagtggggcggaggctctcacggctatgccgattctgtgaagggcagattcaccatcagccgggacaacagcaagaacaccctgtacctgcagatgaacagcctgagagccgaggacaccgccgtgtactattgtgccagaggccaccacaagggctacgacggcagattcttcgactattggggccagggcaccctggtcacagtttcttca

SEQ ID NO: 500 - DNA, 15 bp, Artificial Sequence
  TPP-20955_18206-gl-47-hIgG1wt-Lambda_HCDR1
agctatggcatgcac

SEQ ID NO: 501 - DNA, 51 bp, Artificial Sequence; identical to SEQ ID NO: 483
  TPP-20955_18206-gl-47-hIgG1wt-Lambda_HCDR2

SEQ ID NO: 502 - DNA, 39 bp, Artificial Sequence
  TPP-20955_18206-gl-47-hIgG1wt-Lambda_HCDR3
ggccaccacaagggctacgacggcagattcttcgactat

SEQ ID NO: 503 - DNA, 333 bp, Artificial Sequence; identical to SEQ ID NO: 485
  TPP-20955_18206-gl-47-hIgG1wt-Lambda_VL

SEQ ID NO: 504 - DNA, 42 bp, Artificial Sequence; identical to SEQ ID NO: 486
  TPP-20955_18206-gl-47-hIgG1wt-Lambda_LCDR1

SEQ ID NO: 505 - DNA, 21 bp, Artificial Sequence
  TPP-20955_18206-gl-47-hIgG1wt-Lambda_LCDR2
accaacaacagacggcccagc

SEQ ID NO: 506 - DNA, 33 bp, Artificial Sequence; identical to SEQ ID NO: 434
  TPP-20955_18206-gl-47-hIgG1wt-Lambda_LCDR3

SEQ ID NO: 507 - protein, 452 aa, Artificial Sequence
  TPP-20955_18206-gl-47-hIgG1wt-Lambda_Heavy Chain
EVQLLESGGGLVQPGGSLRLSCAASGFTFSSYGMHWVRQAPGKGLEWVSAIKWGGGSHGYADSVKGRFTISRDNSKNTLYLQMNSLRAEDTAVYYCARGHHKGYDGRFFDYWGQGTLVTVSSASTKGPSVFPLAPSSKSTSGGTAALGCLVKDYFPEPVTVSWNSGALTSGVHTFPAVLQSSGLYSLSSVVTVPSSSLGTQTYICNVNHKPSNTKVDKKVEPKSCDKTHTCPPCPAPELLGGPSVFLFPPKPKDTLMISRTPEVTCVVVDVSHEDPEVKFNWYVDGVEVHNAKTKPREEQYNSTYRVVSVLTVLHQDWLNGKEYKCKVSNKALPAPIEKTISKAKGQPREPQVYTLPPSRDELTKNQVSLTCLVKGFYPSDIAVEWESNGQPENNYKTTPPVLDSDGSFFLYSKLTVDKSRWQQGNVFSCSVMHEALHNHYTQKSLSLSPGK

SEQ ID NO: 508 - protein, 217 aa, Artificial Sequence; identical to SEQ ID NO: 490
  TPP-20955_18206-gl-47-hIgG1wt-Lambda_Light Chain

SEQ ID NO: 509 - protein, 122 aa, Artificial Sequence
  TPP-20965_18206-gl-58-hIgG1wt-Lambda_VH
EVQLLESGGGLVQPGGSLRLSCAASGFTFSSYGMHWVRQAPGKGLEWVSAIKWGGGSTGYADSVKGRFTISRDNSKNTLYLQMNSLRAEDTAVYYCARGHHSGKDGRFFDYWGQGTLVTVSS

SEQ ID NO: 510 - protein, 5 aa, Artificial Sequence
  TPP-20965_18206-gl-58-hIgG1wt-Lambda_HCDR1
SYGMH

SEQ ID NO: 511 - protein, 17 aa, Artificial Sequence
  TPP-20965_18206-gl-58-hIgG1wt-Lambda_HCDR2
AIKWGGGSTGYADSVKG

SEQ ID NO: 512 - protein, 13 aa, Artificial Sequence
  TPP-20965_18206-gl-58-hIgG1wt-Lambda_HCDR3
GHHSGKDGRFFDY

SEQ ID NO: 513 - protein, 111 aa, Artificial Sequence; identical to SEQ ID NO: 477
  TPP-20965_18206-gl-58-hIgG1wt-Lambda_VL

SEQ ID NO: 514 - protein, 14 aa, Artificial Sequence
  TPP-20965_18206-gl-58-hIgG1wt-Lambda_LCDR1
TGSSSNIGAGYNVH

SEQ ID NO: 515 - protein, 7 aa, Artificial Sequence
  TPP-20965_18206-gl-58-hIgG1wt-Lambda_LCDR2
TNNRRPS

SEQ ID NO: 516 - protein, 11 aa, Artificial Sequence
  TPP-20965_18206-gl-58-hIgG1wt-Lambda_LCDR3
AAWDASLSGWV

SEQ ID NO: 517 - DNA, 366 bp, Artificial Sequence
  TPP-20965_18206-gl-58-hIgG1wt-Lambda_VH
gaagttcagctgctggaatctggcggcggactggttcaacctggcggatctctgagactgagctgtgccgccagcggcttcacctttagcagctatggcatgcactgggtccgacaggcccctggcaaaggacttgaatgggtgtccgccattaagtggggcggaggctctacaggctacgccgattctgtgaagggcagattcaccatcagccgggacaacagcaagaacaccctgtacctgcagatgaacagcctgagagccgaggacaccgccgtgtactattgtgccagaggccaccactctggcaaggacggcagattcttcgactattggggccagggcaccctggtcacagtttcttca

SEQ ID NO: 518 - DNA, 15 bp, Artificial Sequence
  TPP-20965_18206-gl-58-hIgG1wt-Lambda_HCDR1
agctatggcatgcac

SEQ ID NO: 519 - DNA, 51 bp, Artificial Sequence
  TPP-20965_18206-gl-58-hIgG1wt-Lambda_HCDR2
gccattaagtggggcggaggctctacaggctacgccgattctgtgaagggc

SEQ ID NO: 520 - DNA, 39 bp, Artificial Sequence; identical to SEQ ID NO: 484
  TPP-20965_18206-gl-58-hIgG1wt-Lambda_HCDR3

SEQ ID NO: 521 - DNA, 333 bp, Artificial Sequence; identical to SEQ ID NO: 485
  TPP-20965_18206-gl-58-hIgG1wt-Lambda_VL

SEQ ID NO: 522 - DNA, 42 bp, Artificial Sequence; identical to SEQ ID NO: 486
  TPP-20965_18206-gl-58-hIgG1wt-Lambda_LCDR1

SEQ ID NO: 523 - DNA, 21 bp, Artificial Sequence
  TPP-20965_18206-gl-58-hIgG1wt-Lambda_LCDR2
accaacaacagacggcccagc

SEQ ID NO: 524 - DNA, 33 bp, Artificial Sequence; identical to SEQ ID NO: 434
  TPP-20965_18206-gl-58-hIgG1wt-Lambda_LCDR3

SEQ ID NO: 525 - protein, 452 aa, Artificial Sequence
  TPP-20965_18206-gl-58-hIgG1wt-Lambda_Heavy Chain
EVQLLESGGGLVQPGGSLRLSCAASGFTFSSYGMHWVRQAPGKGLEWVSAIKWGGGSTGYADSVKGRFTISRDNSKNTLYLQMNSLRAEDTAVYYCARGHHSGKDGRFFDYWGQGTLVTVSSASTKGPSVFPLAPSSKSTSGGTAALGCLVKDYFPEPVTVSWNSGALTSGVHTFPAVLQSSGLYSLSSVVTVPSSSLGTQTYICNVNHKPSNTKVDKKVEPKSCDKTHTCPPCPAPELLGGPSVFLFPPKPKDTLMISRTPEVTCVVVDVSHEDPEVKFNWYVDGVEVHNAKTKPREEQYNSTYRVVSVLTVLHQDWLNGKEYKCKVSNKALPAPIEKTISKAKGQPREPQVYTLPPSRDELTKNQVSLTCLVKGFYPSDIAVEWESNGQPENNYKTTPPVLDSDGSFFLYSKLTVDKSRWQQGNVFSCSVMHEALHNHYTQKSLSLSPGK

SEQ ID NO: 526 - protein, 217 aa, Artificial Sequence; identical to SEQ ID NO: 490
  TPP-20965_18206-gl-58-hIgG1wt-Lambda_Light Chain

SEQ ID NO: 527 - protein, 121 aa, Artificial Sequence
  TPP-21045_17578-gl79-hIgG1-wt-Lambda_VH
EVQLLESGGGLVQPGGSLRLSCAASGFTFSSAWMSWVRQAPGKGLEWVSGISWSGGSTGYALSVKGRFTISRDNSKNTLYLQMNSLRAEDTAVYYCARTYSGHYGPFFDYWGQGTLVTVSS

SEQ ID NO: 528 - protein, 5 aa, Artificial Sequence
  TPP-21045_17578-gl79-hIgG1-wt-Lambda_HCDR1
SAWMS

SEQ ID NO: 529 - protein, 17 aa, Artificial Sequence
  TPP-21045_17578-gl79-hIgG1-wt-Lambda_HCDR2
GISWSGGSTGYALSVKG

SEQ ID NO: 530 - protein, 12 aa, Artificial Sequence
  TPP-21045_17578-gl79-hIgG1-wt-Lambda_HCDR3
TYSGHYGPFFDY

SEQ ID NO: 531 - protein, 110 aa, Artificial Sequence; identical to SEQ ID NO: 333
  TPP-21045_17578-gl79-hIgG1-wt-Lambda_VL

SEQ ID NO: 532 - protein, 13 aa, Artificial Sequence
  TPP-21045_17578-gl79-hIgG1-wt-Lambda_LCDR1
SGSSSNIGSHTVN

SEQ ID NO: 533 - protein, 7 aa, Artificial Sequence
  TPP-21045_17578-gl79-hIgG1-wt-Lambda_LCDR2
RNNQRPS

SEQ ID NO: 534 - protein, 11 aa, Artificial Sequence
  TPP-21045_17578-gl79-hIgG1-wt-Lambda_LCDR3
AAWDDSLNGWV

SEQ ID NO: 535 - DNA, 363 bp, Artificial Sequence
  TPP-21045_17578-gl79-hIgG1-wt-Lambda_VH
gaagttcagctgctggaatctggcggcggactggttcaacctggcggatctctgagactgagctgtgccgccagcggcttcacattttctagcgcctggatgagctgggtccgacaggctcctggaaaaggcctggaatgggtgtccggcatctcttggagcggcggctctacaggatatgccctgtctgtgaagggcagattcaccatcagccgggacaacagcaagaacaccctgtacctgcagatgaacagcctgagagccgaggacaccgccgtgtactactgtgccagaacatacagcggccactacggccctttcttcgactattggggccagggcacactggtcacagtctcttca

SEQ ID NO: 536 - DNA, 15 bp, Artificial Sequence
  TPP-21045_17578-gl79-hIgG1-wt-Lambda_HCDR1
agcgcctggatgagc

SEQ ID NO: 537 - DNA, 51 bp, Artificial Sequence
  TPP-21045_17578-gl79-hIgG1-wt-Lambda_HCDR2
ggcatctcttggagcggcggctctacaggatatgccctgtctgtgaagggc

SEQ ID NO: 538 - DNA, 36 bp, Artificial Sequence
  TPP-21045_17578-gl79-hIgG1-wt-Lambda_HCDR3
acatacagcggccactacggccctttcttcgactat

SEQ ID NO: 539 - DNA, 330 bp, Artificial Sequence; identical to SEQ ID NO: 341
  TPP-21045_17578-gl79-hIgG1-wt-Lambda_VL

SEQ ID NO: 540 - DNA, 39 bp, Artificial Sequence; identical to SEQ ID NO: 342
  TPP-21045_17578-gl79-hIgG1-wt-Lambda_LCDR1

SEQ ID NO: 541 - DNA, 21 bp, Artificial Sequence
  TPP-21045_17578-gl79-hIgG1-wt-Lambda_LCDR2
aggaataatcagcggccctca

SEQ ID NO: 542 - DNA, 33 bp, Artificial Sequence; identical to SEQ ID NO: 344
  TPP-21045_17578-gl79-hIgG1-wt-Lambda_LCDR3

SEQ ID NO: 543 - protein, 451 aa, Artificial Sequence
  TPP-21045_17578-gl79-hIgG1-wt-Lambda_Heavy Chain
EVQLLESGGGLVQPGGSLRLSCAASGFTFSSAWMSWVRQAPGKGLEWVSGISWSGGSTGYALSVKGRFTISRDNSKNTLYLQMNSLRAEDTAVYYCARTYSGHYGPFFDYWGQGTLVTVSSASTKGPSVFPLAPSSKSTSGGTAALGCLVKDYFPEPVTVSWNSGALTSGVHTFPAVLQSSGLYSLSSVVTVPSSSLGTQTYICNVNHKPSNTKVDKKVEPKSCDKTHTCPPCPAPELLGGPSVFLFPPKPKDTLMISRTPEVTCVVVDVSHEDPEVKFNWYVDGVEVHNAKTKPREEQYNSTYRVVSVLTVLHQDWLNGKEYKCKVSNKALPAPIEKTISKAKGQPREPQVYTLPPSRDELTKNQVSLTCLVKGFYPSDIAVEWESNGQPENNYKTTPPVLDSDGSFFLYSKLTVDKSRWQQGNVFSCSVMHEALHNHYTQKSLSLSPGK

SEQ ID NO: 544 - protein, 216 aa, Artificial Sequence; identical to SEQ ID NO: 346
  TPP-21045_17578-gl79-hIgG1-wt-Lambda_Light Chain

SEQ ID NO: 545 - protein, 121 aa, Artificial Sequence
  TPP-21047_17578-gl81-hIgG1-wt-Lambda_VH
EVQLLESGGGLVQPGGSLRLSCAASGFTFSSAWMSWVRQAPGKGLEWVSGISWSGGRTGYALSVKGRFTISRDNSKNTLYLQMNSLRAEDTAVYYCARTYSGHYGPYFDYWGQGTLVTVSS

SEQ ID NO: 546 - protein, 5 aa, Artificial Sequence
  TPP-21047_17578-gl81-hIgG1-wt-Lambda_HCDR1
SAWMS

SEQ ID NO: 547 - protein, 17 aa, Artificial Sequence
  TPP-21047_17578-gl81-hIgG1-wt-Lambda_HCDR2
GISWSGGRTGYALSVKG

SEQ ID NO: 548 - protein, 12 aa, Artificial Sequence
  TPP-21047_17578-gl81-hIgG1-wt-Lambda_HCDR3
TYSGHYGPYFDY

SEQ ID NO: 549 - protein, 110 aa, Artificial Sequence; identical to SEQ ID NO: 333
  TPP-21047_17578-gl81-hIgG1-wt-Lambda_VL

SEQ ID NO: 550 - protein, 13 aa, Artificial Sequence
  TPP-21047_17578-gl81-hIgG1-wt-Lambda_LCDR1
SGSSSNIGSHTVN

SEQ ID NO: 551 - protein, 7 aa, Artificial Sequence
  TPP-21047_17578-gl81-hIgG1-wt-Lambda_LCDR2
RNNQRPS

SEQ ID NO: 552 - protein, 11 aa, Artificial Sequence
  TPP-21047_17578-gl81-hIgG1-wt-Lambda_LCDR3
AAWDDSLNGWV

SEQ ID NO: 553 - DNA, 363 bp, Artificial Sequence
  TPP-21047_17578-gl81-hIgG1-wt-Lambda_VH
gaagttcagctgctggaatctggcggcggactggttcaacctggcggatctctgagactgagctgtgccgccagcggcttcacattttctagcgcctggatgagctgggtccgacaggctcctggaaaaggcctggaatgggtgtccggcatctcttggagcggcggcagaacaggatatgccctgtctgtgaagggcagattcaccatcagccgggacaacagcaagaacaccctgtacctgcagatgaacagcctgagagccgaggacaccgccgtgtactactgtgccagaacatacagcggccactacggcccctacttcgattattggggccagggcacactggtcaccgtttcttca

SEQ ID NO: 554 - DNA, 15 bp, Artificial Sequence
  TPP-21047_17578-gl81-hIgG1-wt-Lambda_HCDR1
agcgcctggatgagc

SEQ ID NO: 555 - DNA, 51 bp, Artificial Sequence
  TPP-21047_17578-gl81-hIgG1-wt-Lambda_HCDR2
ggcatctcttggagcggcggcagaacaggatatgccctgtctgtgaagggc

SEQ ID NO: 556 - DNA, 36 bp, Artificial Sequence; identical to SEQ ID NO: 466
  TPP-21047_17578-gl81-hIgG1-wt-Lambda_HCDR3

SEQ ID NO: 557 - DNA, 330 bp, Artificial Sequence; identical to SEQ ID NO: 341
  TPP-21047_17578-gl81-hIgG1-wt-Lambda_VL

SEQ ID NO: 558 - DNA, 39 bp, Artificial Sequence; identical to SEQ ID NO: 342
  TPP-21047_17578-gl81-hIgG1-wt-Lambda_LCDR1

SEQ ID NO: 559 - DNA, 21 bp, Artificial Sequence
  TPP-21047_17578-gl81-hIgG1-wt-Lambda_LCDR2
aggaataatcagcggccctca

SEQ ID NO: 560 - DNA, 33 bp, Artificial Sequence; identical to SEQ ID NO: 344
  TPP-21047_17578-gl81-hIgG1-wt-Lambda_LCDR3

SEQ ID NO: 561 - protein, 451 aa, Artificial Sequence
  TPP-21047_17578-gl81-hIgG1-wt-Lambda_Heavy Chain
EVQLLESGGGLVQPGGSLRLSCAASGFTFSSAWMSWVRQAPGKGLEWVSGISWSGGRTGYALSVKGRFTISRDNSKNTLYLQMNSLRAEDTAVYYCARTYSGHYGPYFDYWGQGTLVTVSSASTKGPSVFPLAPSSKSTSGGTAALGCLVKDYFPEPVTVSWNSGALTSGVHTFPAVLQSSGLYSLSSVVTVPSSSLGTQTYICNVNHKPSNTKVDKKVEPKSCDKTHTCPPCPAPELLGGPSVFLFPPKPKDTLMISRTPEVTCVVVDVSHEDPEVKFNWYVDGVEVHNAKTKPREEQYNSTYRVVSVLTVLHQDWLNGKEYKCKVSNKALPAPIEKTISKAKGQPREPQVYTLPPSRDELTKNQVSLTCLVKGFYPSDIAVEWESNGQPENNYKTTPPVLDSDGSFFLYSKLTVDKSRWQQGNVFSCSVMHEALHNHYTQKSLSLSPGK

SEQ ID NO: 562 - protein, 216 aa, Artificial Sequence; identical to SEQ ID NO: 346
  TPP-21047_17578-gl81-hIgG1-wt-Lambda_Light Chain

SEQ ID NO: 563 - protein, 122 aa, Artificial Sequence
  TPP-21181_18205-gl46 -hIgG1-wt-Lambda_VH
EVQLLESGGGLVQPGGSLRLSCAASGFTFSSYAMSWVRQAPGKGLEWVSGIRWNNGSKGYAGSVKGRFTISRDNSKNTLYLQMNSLRAEDTAVYYCARSGNYYYGYHGMDVWGQGTLVTVSS

SEQ ID NO: 564 - protein, 5 aa, Artificial Sequence
  TPP-21181_18205-gl46 -hIgG1-wt-Lambda_HCDR1
SYAMS

SEQ ID NO: 565 - protein, 17 aa, Artificial Sequence
  TPP-21181_18205-gl46 -hIgG1-wt-Lambda_HCDR2
GIRWNNGSKGYAGSVKG

SEQ ID NO: 566 - protein, 13 aa, Artificial Sequence
  TPP-21181_18205-gl46 -hIgG1-wt-Lambda_HCDR3
SGNYYYGYHGMDV

SEQ ID NO: 567 - protein, 108 aa, Artificial Sequence; identical to SEQ ID NO: 405
  TPP-21181_18205-gl46 -hIgG1-wt-Lambda_VL

SEQ ID NO: 568 - protein, 13 aa, Artificial Sequence
  TPP-21181_18205-gl46 -hIgG1-wt-Lambda_LCDR1
SGGNSNIGTYFVS

SEQ ID NO: 569 - protein, 7 aa, Artificial Sequence
  TPP-21181_18205-gl46 -hIgG1-wt-Lambda_LCDR2
TNNQRPS

SEQ ID NO: 570 - protein, 9 aa, Artificial Sequence
  TPP-21181_18205-gl46 -hIgG1-wt-Lambda_LCDR3
ETWDSNTRV

SEQ ID NO: 571 - DNA, 366 bp, Artificial Sequence
  TPP-21181_18205-gl46 -hIgG1-wt-Lambda_VH
gaagttcagctgctggaatctggcggcggactggttcaacctggcggatctctgagactgagctgtgccgccagcggcttcacctttagcagctacgccatgagctgggtccgacaggctcctggcaaaggccttgaatgggtgtccggcatcagatggaacaacggcagcaagggctatgccggctctgtgaagggcagattcaccatcagccgggacaacagcaagaacaccctgtacctgcagatgaacagcctgagagccgaggacaccgccgtgtactactgtgccagaagcggcaactactactacggctaccacggcatggatgtgtggggccagggaacactggttaccgtttcttca

SEQ ID NO: 572 - DNA, 15 bp, Artificial Sequence
  TPP-21181_18205-gl46 -hIgG1-wt-Lambda_HCDR1
agctacgccatgagc

SEQ ID NO: 573 - DNA, 51 bp, Artificial Sequence
  TPP-21181_18205-gl46 -hIgG1-wt-Lambda_HCDR2
ggcatcagatggaacaacggcagcaagggctatgccggctctgtgaagggc

SEQ ID NO: 574 - DNA, 39 bp, Artificial Sequence
  TPP-21181_18205-gl46 -hIgG1-wt-Lambda_HCDR3
agcggcaactactactacggctaccacggcatggatgtg

SEQ ID NO: 575 - DNA, 324 bp, Artificial Sequence; identical to SEQ ID NO: 413
  TPP-21181_18205-gl46 -hIgG1-wt-Lambda_VL

SEQ ID NO: 576 - DNA, 39 bp, Artificial Sequence; identical to SEQ ID NO: 414
  TPP-21181_18205-gl46 -hIgG1-wt-Lambda_LCDR1

SEQ ID NO: 577 - DNA, 21 bp, Artificial Sequence
  TPP-21181_18205-gl46 -hIgG1-wt-Lambda_LCDR2
accaacaaccagcggcctagc

SEQ ID NO: 578 - DNA, 27 bp, Artificial Sequence
  TPP-21181_18205-gl46 -hIgG1-wt-Lambda_LCDR3
gagacatgggacagcaacaccagagtg

SEQ ID NO: 579 - protein, 452 aa, Artificial Sequence
  TPP-21181_18205-gl46 -hIgG1-wt-Lambda_Heavy Chain
EVQLLESGGGLVQPGGSLRLSCAASGFTFSSYAMSWVRQAPGKGLEWVSGIRWNNGSKGYAGSVKGRFTISRDNSKNTLYLQMNSLRAEDTAVYYCARSGNYYYGYHGMDVWGQGTLVTVSSASTKGPSVFPLAPSSKSTSGGTAALGCLVKDYFPEPVTVSWNSGALTSGVHTFPAVLQSSGLYSLSSVVTVPSSSLGTQTYICNVNHKPSNTKVDKKVEPKSCDKTHTCPPCPAPELLGGPSVFLFPPKPKDTLMISRTPEVTCVVVDVSHEDPEVKFNWYVDGVEVHNAKTKPREEQYNSTYRVVSVLTVLHQDWLNGKEYKCKVSNKALPAPIEKTISKAKGQPREPQVYTLPPSRDELTKNQVSLTCLVKGFYPSDIAVEWESNGQPENNYKTTPPVLDSDGSFFLYSKLTVDKSRWQQGNVFSCSVMHEALHNHYTQKSLSLSPGK

SEQ ID NO: 580 - protein, 214 aa, Artificial Sequence; identical to SEQ ID NO: 418
  TPP-21181_18205-gl46 -hIgG1-wt-Lambda_Light Chain

SEQ ID NO: 581 - protein, 122 aa, Artificial Sequence
  TPP-21183_18205-gl48 -hIgG1-wt-Lambda_VH
EVQLLESGGGLVQPGGSLRLSCAASGFTFSSYAMSWVRQAPGKGLEWVSGIRWNNGSKGYAGSVKGRFTISRDNSKNTLYLQMNSLRAEDTAVYYCARSGNEYYGYHGMDVWGQGTLVTVSS

SEQ ID NO: 582 - protein, 5 aa, Artificial Sequence
  TPP-21183_18205-gl48 -hIgG1-wt-Lambda_HCDR1
SYAMS

SEQ ID NO: 583 - protein, 17 aa, Artificial Sequence
  TPP-21183_18205-gl48 -hIgG1-wt-Lambda_HCDR2
GIRWNNGSKGYAGSVKG

SEQ ID NO: 584 - protein, 13 aa, Artificial Sequence
  TPP-21183_18205-gl48 -hIgG1-wt-Lambda_HCDR3
SGNEYYGYHGMDV

SEQ ID NO: 585 - protein, 108 aa, Artificial Sequence; identical to SEQ ID NO: 405
  TPP-21183_18205-gl48 -hIgG1-wt-Lambda_VL

SEQ ID NO: 586 - protein, 13 aa, Artificial Sequence
  TPP-21183_18205-gl48 -hIgG1-wt-Lambda_LCDR1
SGGNSNIGTYFVS

SEQ ID NO: 587 - protein, 7 aa, Artificial Sequence
  TPP-21183_18205-gl48 -hIgG1-wt-Lambda_LCDR2
TNNQRPS

SEQ ID NO: 588 - protein, 9 aa, Artificial Sequence
  TPP-21183_18205-gl48 -hIgG1-wt-Lambda_LCDR3
ETWDSNTRV

SEQ ID NO: 589 - DNA, 366 bp, Artificial Sequence
  TPP-21183_18205-gl48 -hIgG1-wt-Lambda_VH
gaagttcagctgctggaatctggcggcggactggttcaacctggcggatctctgagactgagctgtgccgccagcggcttcacctttagcagctacgccatgagctgggtccgacaggctcctggcaaaggccttgaatgggtgtccggcatcagatggaacaacggcagcaagggctatgccggctctgtgaagggcagattcaccatcagccgggacaacagcaagaacaccctgtacctgcagatgaacagcctgagagccgaggacaccgccgtgtactactgtgccagaagcggcaacgagtactacggctaccacggcatggatgtgtggggccagggaacactggttaccgtttcttca

SEQ ID NO: 590 - DNA, 15 bp, Artificial Sequence
  TPP-21183_18205-gl48 -hIgG1-wt-Lambda_HCDR1
agctacgccatgagc

SEQ ID NO: 591 - DNA, 51 bp, Artificial Sequence; identical to SEQ ID NO: 573
  TPP-21183_18205-gl48 -hIgG1-wt-Lambda_HCDR2

SEQ ID NO: 592 - DNA, 39 bp, Artificial Sequence
  TPP-21183_18205-gl48 -hIgG1-wt-Lambda_HCDR3
agcggcaacgagtactacggctaccacggcatggatgtg

SEQ ID NO: 593 - DNA, 324 bp, Artificial Sequence; identical to SEQ ID NO: 413
  TPP-21183_18205-gl48 -hIgG1-wt-Lambda_VL

SEQ ID NO: 594 - DNA, 39 bp, Artificial Sequence; identical to SEQ ID NO: 414
  TPP-21183_18205-gl48 -hIgG1-wt-Lambda_LCDR1

SEQ ID NO: 595 - DNA, 21 bp, Artificial Sequence
  TPP-21183_18205-gl48 -hIgG1-wt-Lambda_LCDR2
accaacaaccagcggcctagc

SEQ ID NO: 596 - DNA, 27 bp, Artificial Sequence
  TPP-21183_18205-gl48 -hIgG1-wt-Lambda_LCDR3
gagacatgggacagcaacaccagagtg

SEQ ID NO: 597 - protein, 452 aa, Artificial Sequence
  TPP-21183_18205-gl48 -hIgG1-wt-Lambda_Heavy Chain
EVQLLESGGGLVQPGGSLRLSCAASGFTFSSYAMSWVRQAPGKGLEWVSGIRWNNGSKGYAGSVKGRFTISRDNSKNTLYLQMNSLRAEDTAVYYCARSGNEYYGYHGMDVWGQGTLVTVSSASTKGPSVFPLAPSSKSTSGGTAALGCLVKDYFPEPVTVSWNSGALTSGVHTFPAVLQSSGLYSLSSVVTVPSSSLGTQTYICNVNHKPSNTKVDKKVEPKSCDKTHTCPPCPAPELLGGPSVFLFPPKPKDTLMISRTPEVTCVVVDVSHEDPEVKFNWYVDGVEVHNAKTKPREEQYNSTYRVVSVLTVLHQDWLNGKEYKCKVSNKALPAPIEKTISKAKGQPREPQVYTLPPSRDELTKNQVSLTCLVKGFYPSDIAVEWESNGQPENNYKTTPPVLDSDGSFFLYSKLTVDKSRWQQGNVFSCSVMHEALHNHYTQKSLSLSPGK

SEQ ID NO: 598 - protein, 214 aa, Artificial Sequence; identical to SEQ ID NO: 418
  TPP-21183_18205-gl48 -hIgG1-wt-Lambda_Light Chain

SEQ ID NO: 599 - protein, 122 aa, Artificial Sequence
  TPP-21360_18206-gl25-gl13-hIgG1Lambda_VH
EVQLLESGGGLVQPGGSLRLSCAASGFTFSSYGMHWVRQAPGKGLEWVSAINWNGGSTGYADSVKGRFTISRDNSKNTLYLQMNSLRAEDTAVYYCARGHHSGYDGRFFDYWGQGTLVTVSS

SEQ ID NO: 600 - protein, 5 aa, Artificial Sequence
  TPP-21360_18206-gl25-gl13-hIgG1Lambda_HCDR1
SYGMH

SEQ ID NO: 601 - protein, 17 aa, Artificial Sequence
  TPP-21360_18206-gl25-gl13-hIgG1Lambda_HCDR2
AINWNGGSTGYADSVKG

SEQ ID NO: 602 - protein, 13 aa, Artificial Sequence
  TPP-21360_18206-gl25-gl13-hIgG1Lambda_HCDR3
GHHSGYDGRFFDY

SEQ ID NO: 603 - protein, 111 aa, Artificial Sequence; identical to SEQ ID NO: 477
  TPP-21360_18206-gl25-gl13-hIgG1Lambda_VL

SEQ ID NO: 604 - protein, 14 aa, Artificial Sequence
  TPP-21360_18206-gl25-gl13-hIgG1Lambda_LCDR1
TGSSSNIGAGYNVH

SEQ ID NO: 605 - protein, 7 aa, Artificial Sequence
  TPP-21360_18206-gl25-gl13-hIgG1Lambda_LCDR2
TNNRRPS

SEQ ID NO: 606 - protein, 11 aa, Artificial Sequence
  TPP-21360_18206-gl25-gl13-hIgG1Lambda_LCDR3
AAWDASLSGWV

SEQ ID NO: 607 - DNA, 366 bp, Artificial Sequence
  TPP-21360_18206-gl25-gl13-hIgG1Lambda_VH
gaagttcagctgctggaatctggcggcggactggttcaacctggcggatctctgagactgagctgtgccgccagcggcttcacctttagcagctatggcatgcactgggtccgacaggcccctggcaaaggacttgaatgggtgtccgccatcaactggaatggcggctctacaggctacgccgactctgtgaagggcagattcaccatcagccgggacaacagcaagaacaccctgtacctgcagatgaactccctgagagccgaggacaccgccgtgtactattgtgccagaggccaccacagcggctacgacggcagattctttgactattggggccagggcaccctggtcacagtttcttca

SEQ ID NO: 608 - DNA, 15 bp, Artificial Sequence
  TPP-21360_18206-gl25-gl13-hIgG1Lambda_HCDR1
agctatggcatgcac

SEQ ID NO: 609 - DNA, 51 bp, Artificial Sequence
  TPP-21360_18206-gl25-gl13-hIgG1Lambda_HCDR2
gccatcaactggaatggcggctctacaggctacgccgactctgtgaagggc

SEQ ID NO: 610 - DNA, 39 bp, Artificial Sequence; identical to SEQ ID NO: 430
  TPP-21360_18206-gl25-gl13-hIgG1Lambda_HCDR3

SEQ ID NO: 611 - DNA, 333 bp, Artificial Sequence; identical to SEQ ID NO: 485
  TPP-21360_18206-gl25-gl13-hIgG1Lambda_VL

SEQ ID NO: 612 - DNA, 42 bp, Artificial Sequence; identical to SEQ ID NO: 486
  TPP-21360_18206-gl25-gl13-hIgG1Lambda_LCDR1

SEQ ID NO: 613 - DNA, 21 bp, Artificial Sequence
  TPP-21360_18206-gl25-gl13-hIgG1Lambda_LCDR2
accaacaacagacggcccagc

SEQ ID NO: 614 - DNA, 33 bp, Artificial Sequence; identical to SEQ ID NO: 434
  TPP-21360_18206-gl25-gl13-hIgG1Lambda_LCDR3

SEQ ID NO: 615 - protein, 451 aa, Artificial Sequence
  TPP-21360_18206-gl25-gl13-hIgG1Lambda_Heavy Chain
EVQLLESGGGLVQPGGSLRLSCAASGFTFSSYGMHWVRQAPGKGLEWVSAINWNGGSTGYADSVKGRFTISRDNSKNTLYLQMNSLRAEDTAVYYCARGHHSGYDGRFFDYWGQGTLVTVSSASTKGPSVFPLAPSSKSTSGGTAALGCLVKDYFPEPVTVSWNSGALTSGVHTFPAVLQSSGLYSLSSVVTVPSSSLGTQTYICNVNHKPSNTKVDKKVEPKSCDKTHTCPPCPAPELLGGPSVFLFPPKPKDTLMISRTPEVTCVVVDVSHEDPEVKFNWYVDGVEVHNAKTKPREEQYNSTYRVVSVLTVLHQDWLNGKEYKCKVSNKALPAPIEKTISKAKGQPREPQVYTLPPSRDELTKNQVSLTCLVKGFYPSDIAVEWESNGQPENNYKTTPPVLDSDGSFFLYSKLTVDKSRWQQGNVFSCSVMHEALHNHYTQKSLSLSPG

SEQ ID NO: 616 - protein, 217 aa, Artificial Sequence; identical to SEQ ID NO: 490
  TPP-21360_18206-gl25-gl13-hIgG1Lambda_Light Chain

SEQ ID NO: 617 - protein, 122 aa, Artificial Sequence; identical to SEQ ID NO: 599
  TPP-23411_21360-hIgG1wtlambda_VH

SEQ ID NO: 618 - protein, 5 aa, Artificial Sequence
  TPP-23411_21360-hIgG1wtlambda_HCDR1
SYGMH

SEQ ID NO: 619 - protein, 17 aa, Artificial Sequence
  TPP-23411_21360-hIgG1wtlambda_HCDR2
AINWNGGSTGYADSVKG

SEQ ID NO: 620 - protein, 13 aa, Artificial Sequence
  TPP-23411_21360-hIgG1wtlambda_HCDR3
GHHSGYDGRFFDY

SEQ ID NO: 621 - protein, 111 aa, Artificial Sequence; identical to SEQ ID NO: 477
  TPP-23411_21360-hIgG1wtlambda_VL

SEQ ID NO: 622 - protein, 14 aa, Artificial Sequence
  TPP-23411_21360-hIgG1wtlambda_LCDR1
TGSSSNIGAGYNVH

SEQ ID NO: 623 - protein, 7 aa, Artificial Sequence
  TPP-23411_21360-hIgG1wtlambda_LCDR2
TNNRRPS

SEQ ID NO: 624 - protein, 11 aa, Artificial Sequence
  TPP-23411_21360-hIgG1wtlambda_LCDR3
AAWDASLSGWV

SEQ ID NO: 625 - DNA, 366 bp, Artificial Sequence
  TPP-23411_21360-hIgG1wtlambda_VH
gaggtgcagctgctggaatctggcggaggattggttcagcctggcggctctctgagactgtcttgtgccgcttccggcttcaccttctccagctacggaatgcactgggtccgacaggcccctggcaaaggattggaatgggtgtccgccatcaactggaacggcggctctaccggctacgccgattctgtgaagggcagattcaccatcagccgggacaactccaagaacaccctgtacctgcagatgaactccctgagagccgaggacaccgccgtgtactattgtgctagaggccaccactctggctacgacggcagattcttcgactattggggccagggcaccctggtcacagtttcttca

SEQ ID NO: 626 - DNA, 15 bp, Artificial Sequence
  TPP-23411_21360-hIgG1wtlambda_HCDR1
agctacggaatgcac

SEQ ID NO: 627 - DNA, 51 bp, Artificial Sequence
  TPP-23411_21360-hIgG1wtlambda_HCDR2
gccatcaactggaacggcggctctaccggctacgccgattctgtgaagggc

SEQ ID NO: 628 - DNA, 39 bp, Artificial Sequence
  TPP-23411_21360-hIgG1wtlambda_HCDR3
ggccaccactctggctacgacggcagattcttcgactat

SEQ ID NO: 629 - DNA, 333 bp, Artificial Sequence; identical to SEQ ID NO: 485
  TPP-23411_21360-hIgG1wtlambda_VL

SEQ ID NO: 630 - DNA, 42 bp, Artificial Sequence; identical to SEQ ID NO: 486
  TPP-23411_21360-hIgG1wtlambda_LCDR1

SEQ ID NO: 631 - DNA, 21 bp, Artificial Sequence
  TPP-23411_21360-hIgG1wtlambda_LCDR2
accaacaacagacggcccagc

SEQ ID NO: 632 - DNA, 33 bp, Artificial Sequence; identical to SEQ ID NO: 434
  TPP-23411_21360-hIgG1wtlambda_LCDR3

SEQ ID NO: 633 - protein, 452 aa, Artificial Sequence
  TPP-23411_21360-hIgG1wtlambda_Heavy Chain
EVQLLESGGGLVQPGGSLRLSCAASGFTFSSYGMHWVRQAPGKGLEWVSAINWNGGSTGYADSVKGRFTISRDNSKNTLYLQMNSLRAEDTAVYYCARGHHSGYDGRFFDYWGQGTLVTVSSASTKGPSVFPLAPSSKSTSGGTAALGCLVKDYFPEPVTVSWNSGALTSGVHTFPAVLQSSGLYSLSSVVTVPSSSLGTQTYICNVNHKPSNTKVDKKVEPKSCDKTHTCPPCPAPELLGGPSVFLFPPKPKDTLMISRTPEVTCVVVDVSHEDPEVKFNWYVDGVEVHNAKTKPREEQYNSTYRVVSVLTVLHQDWLNGKEYKCKVSNKALPAPIEKTISKAKGQPREPQVYTLPPSRDELTKNQVSLTCLVKGFYPSDIAVEWESNGQPENNYKTTPPVLDSDGSFFLYSKLTVDKSRWQQGNVFSCSVMHEALHNHYTQKSLSLSPGK

SEQ ID NO: 634 - protein, 217 aa, Artificial Sequence; identical to SEQ ID NO: 490
  TPP-23411_21360-hIgG1wtlambda_Light Chain

SEQ ID NO: 635-659 - skipped (25 entries)

SEQ ID NO: 660 - protein, 122 aa, Artificial Sequence
  TPP-29596_18206-gl13-gl14-hIgG1wtLambda_VH_PRT
EVQLLESGGGLVQPGGSLRLSCAASGFTFSSYGMHWVRQAPGKGLEWVSGINWNGGSTGYADSVKGRFTISRDNSKNTLYLQMNSLRAEDTAVYYCARGHHSGYDGRFFDYWGQGTLVTVSS

SEQ ID NO: 661 - protein, 5 aa, Artificial Sequence
  TPP-29596_18206-gl13-gl14-hIgG1wtLambda_HCDR1_PRT
SYGMH

SEQ ID NO: 662 - protein, 17 aa, Artificial Sequence
  TPP-29596_18206-gl13-gl14-hIgG1wtLambda_HCDR2_PRT
GINWNGGSTGYADSVKG

SEQ ID NO: 663 - protein, 13 aa, Artificial Sequence
  TPP-29596_18206-gl13-gl14-hIgG1wtLambda_HCDR3_PRT
GHHSGYDGRFFDY

SEQ ID NO: 664 - protein, 111 aa, Artificial Sequence; identical to SEQ ID NO: 477
  TPP-29596_18206-gl13-gl14-hIgG1wtLambda_VL_PRT

SEQ ID NO: 665 - protein, 14 aa, Artificial Sequence
  TPP-29596_18206-gl13-gl14-hIgG1wtLambda_LCDR1_PRT
TGSSSNIGAGYNVH

SEQ ID NO: 666 - protein, 7 aa, Artificial Sequence
  TPP-29596_18206-gl13-gl14-hIgG1wtLambda_LCDR2_PRT
TNNRRPS

SEQ ID NO: 667 - protein, 11 aa, Artificial Sequence
  TPP-29596_18206-gl13-gl14-hIgG1wtLambda_LCDR3_PRT
AAWDASLSGWV

SEQ ID NO: 668 - DNA, 366 bp, Artificial Sequence
  TPP-29596_18206-gl13-gl14-hIgG1wtLambda_VH_DNA
gaagttcagctgctggaatctggcggcggactggttcaacctggcggatctctgagactgagctgtgccgccagcggcttcacctttagcagctatggcatgcactgggtccgacaggcccctggcaaaggacttgaatgggtgtccggcatcaactggaatggcggctctacaggctacgccgactctgtgaagggcagattcaccatcagccgggacaacagcaagaacaccctgtacctgcagatgaactccctgagagccgaggacaccgccgtgtactattgtgccagaggccaccacagcggctacgacggcagattctttgactattggggccagggcaccctggtcacagtttcttca

SEQ ID NO: 669 - DNA, 15 bp, Artificial Sequence
  TPP-29596_18206-gl13-gl14-hIgG1wtLambda_HCDR1_DNA
agctatggcatgcac

SEQ ID NO: 670 - DNA, 51 bp, Artificial Sequence; identical to SEQ ID NO: 429
  TPP-29596_18206-gl13-gl14-hIgG1wtLambda_HCDR2_DNA

SEQ ID NO: 671 - DNA, 39 bp, Artificial Sequence; identical to SEQ ID NO: 430
  TPP-29596_18206-gl13-gl14-hIgG1wtLambda_HCDR3_DNA

SEQ ID NO: 672 - DNA, 333 bp, Artificial Sequence; identical to SEQ ID NO: 485
  TPP-29596_18206-gl13-gl14-hIgG1wtLambda_VL_DNA

SEQ ID NO: 673 - DNA, 42 bp, Artificial Sequence; identical to SEQ ID NO: 486
  TPP-29596_18206-gl13-gl14-hIgG1wtLambda_LCDR1_DNA

SEQ ID NO: 674 - DNA, 21 bp, Artificial Sequence
  TPP-29596_18206-gl13-gl14-hIgG1wtLambda_LCDR2_DNA
accaacaacagacggcccagc

SEQ ID NO: 675 - DNA, 33 bp, Artificial Sequence; identical to SEQ ID NO: 434
  TPP-29596_18206-gl13-gl14-hIgG1wtLambda_LCDR3_DNA

SEQ ID NO: 676 - protein, 452 aa, Artificial Sequence
  TPP-29596_18206-gl13-gl14-hIgG1wtLambda_HC_PRT
EVQLLESGGGLVQPGGSLRLSCAASGFTFSSYGMHWVRQAPGKGLEWVSGINWNGGSTGYADSVKGRFTISRDNSKNTLYLQMNSLRAEDTAVYYCARGHHSGYDGRFFDYWGQGTLVTVSSASTKGPSVFPLAPSSKSTSGGTAALGCLVKDYFPEPVTVSWNSGALTSGVHTFPAVLQSSGLYSLSSVVTVPSSSLGTQTYICNVNHKPSNTKVDKKVEPKSCDKTHTCPPCPAPELLGGPSVFLFPPKPKDTLMISRTPEVTCVVVDVSHEDPEVKFNWYVDGVEVHNAKTKPREEQYNSTYRVVSVLTVLHQDWLNGKEYKCKVSNKALPAPIEKTISKAKGQPREPQVYTLPPSRDELTKNQVSLTCLVKGFYPSDIAVEWESNGQPENNYKTTPPVLDSDGSFFLYSKLTVDKSRWQQGNVFSCSVMHEALHNHYTQKSLSLSPGK

SEQ ID NO: 677 - protein, 217 aa, Artificial Sequence; identical to SEQ ID NO: 490
  TPP-29596_18206-gl13-gl14-hIgG1wtLambda_LC_PRT

SEQ ID NO: 678 - DNA, 1356 bp, Artificial Sequence
  TPP-29596_18206-gl13-gl14-hIgG1wtLambda_HC_DNA
gaagttcagctgctggaatctggcggcggactggttcaacctggcggatctctgagactgagctgtgccgccagcggcttcacctttagcagctatggcatgcactgggtccgacaggcccctggcaaaggacttgaatgggtgtccggcatcaactggaatggcggctctacaggctacgccgactctgtgaagggcagattcaccatcagccgggacaacagcaagaacaccctgtacctgcagatgaactccctgagagccgaggacaccgccgtgtactattgtgccagaggccaccacagcggctacgacggcagattctttgactattggggccagggcaccctggtcacagtttcttcagccagcaccaagggccccagcgtgttccctctggcccctagcagcaagagcacatctggcggaacagccgccctgggctgcctcgtgaaggactactttcccgagcccgtgaccgtgtcctggaactctggcgctctgacaagcggcgtgcacacctttccagccgtgctgcagagcagcggcctgtactctctgagcagcgtcgtgacagtgcccagcagctctctgggcacccagacctacatctgcaacgtgaaccacaagcccagcaacaccaaggtggacaagaaggtggaacccaagagctgcgacaagacccacacctgtcccccttgtcctgcccccgaactgctgggaggcccttccgtgttcctgttccccccaaagcccaaggacaccctgatgatcagccggacccccgaagtgacctgcgtggtggtggatgtgtcccacgaggaccctgaagtgaagttcaattggtacgtggacggcgtggaagtgcacaacgccaagaccaagcctagagaggaacagtacaacagcacctaccgggtggtgtccgtgctgacagtgctgcaccaggactggctgaacggcaaagagtacaagtgcaaggtgtccaacaaggccctgcctgcccccatcgagaaaaccatcagcaaggccaagggccagccccgcgaaccccaggtgtacacactgcccccaagcagggacgagctgaccaagaaccaggtgtccctgacctgtctcgtgaaaggcttctacccctccgatatcgccgtggaatgggagagcaacggccagcccgagaacaactacaagaccaccccccctgtgctggacagcgacggctcattcttcctgtacagcaagctgaccgtggacaagtcccggtggcagcagggcaacgtgttcagctgcagcgtgatgcacgaggccctgcacaaccactacacccagaagtccctgagcctgagccctggcaag

SEQ ID NO: 679 - DNA, 651 bp, Artificial Sequence
  TPP-29596_18206-gl13-gl14-hIgG1wtLambda_LC_DNA
cagtctgttctgacacagcctccatctgtgtctggcgcccctggacagagagtgaccatcagctgtacaggcagcagctccaatatcggagccggctacaacgtgcactggtatcagcagctgcctggcacagcccctaaactgctgatctacaccaacaacagacggcccagcggcgtgcccgatagattttctggcagcaagagcggcacaagcgccagcctggctatctctggactgagatctgaggacgaggccgactactattgcgccgcctgggatgcttctctgagcggatgggttttcggcggaggcaccaaactgacagtgctaggccagcctaaagccgcccctagcgtgaccctgttccctccaagcagcgaggaactgcaggccaacaaggccaccctcgtgtgcctgatcagcgacttctatcctggcgccgtgaccgtggcctggaaggccgatagctctcctgtgaaggccggcgtggaaaccaccacccctagcaagcagagcaacaacaaatacgccgccagcagctacctgagcctgacccccgagcagtggaagtcccacagatcctacagctgccaagtgacccacgagggcagcaccgtggaaaagacagtggcccctaccgagtgcagc

SEQ ID NO: 680 - protein, 122 aa, Artificial Sequence; identical to SEQ ID NO: 599
  TPP-29597_18206-gl11-gl25-hIgG1wtLambda_VH_PRT

SEQ ID NO: 681 - protein, 5 aa, Artificial Sequence
  TPP-29597_18206-gl11-gl25-hIgG1wtLambda_HCDR1_PRT
SYGMH

SEQ ID NO: 682 - protein, 17 aa, Artificial Sequence
  TPP-29597_18206-gl11-gl25-hIgG1wtLambda_HCDR2_PRT
AINWNGGSTGYADSVKG

SEQ ID NO: 683 - protein, 13 aa, Artificial Sequence
  TPP-29597_18206-gl11-gl25-hIgG1wtLambda_HCDR3_PRT
GHHSGYDGRFFDY

SEQ ID NO: 684 - protein, 111 aa, Artificial Sequence
  TPP-29597_18206-gl11-gl25-hIgG1wtLambda_VL_PRT
QSVLTQPPSASGAPGQRVTISCTGSSSNIGAGYNVHWYQQLPGTAPKLLIYTNNRRPSGVPDRFSGSKSGTSASLAISGLRSEDEADYYCAAWDASLSGWVFGGGTKLTVL

SEQ ID NO: 685 - protein, 14 aa, Artificial Sequence
  TPP-29597_18206-gl11-gl25-hIgG1wtLambda_LCDR1_PRT
TGSSSNIGAGYNVH

SEQ ID NO: 686 - protein, 7 aa, Artificial Sequence
  TPP-29597_18206-gl11-gl25-hIgG1wtLambda_LCDR2_PRT
TNNRRPS

SEQ ID NO: 687 - protein, 11 aa, Artificial Sequence
  TPP-29597_18206-gl11-gl25-hIgG1wtLambda_LCDR3_PRT
AAWDASLSGWV

SEQ ID NO: 688 - DNA, 366 bp, Artificial Sequence; identical to SEQ ID NO: 607
  TPP-29597_18206-gl11-gl25-hIgG1wtLambda_VH_DNA

SEQ ID NO: 689 - DNA, 15 bp, Artificial Sequence
  TPP-29597_18206-gl11-gl25-hIgG1wtLambda_HCDR1_DNA
agctatggcatgcac

SEQ ID NO: 690 - DNA, 51 bp, Artificial Sequence; identical to SEQ ID NO: 609
  TPP-29597_18206-gl11-gl25-hIgG1wtLambda_HCDR2_DNA

SEQ ID NO: 691 - DNA, 39 bp, Artificial Sequence; identical to SEQ ID NO: 430
  TPP-29597_18206-gl11-gl25-hIgG1wtLambda_HCDR3_DNA

SEQ ID NO: 692 - DNA, 333 bp, Artificial Sequence
  TPP-29597_18206-gl11-gl25-hIgG1wtLambda_VL_DNA
cagtctgttctgacacagcctccatctgctagcggagcccctggacagagagtgaccatcagctgtacaggcagcagctccaatatcggagccggctacaacgtgcactggtatcagcagctgcctggcacagcccctaaactgctgatctacaccaacaacagacggcccagcggcgtgcccgatagattttctggcagcaagagcggcacaagcgccagcctggctatctctggactgagatctgaggacgaggccgactactattgcgccgcctgggatgcttctctgagcggatgggttttcggcggaggcaccaaactgacagtgcta

SEQ ID NO: 693 - DNA, 42 bp, Artificial Sequence; identical to SEQ ID NO: 486
  TPP-29597_18206-gl11-gl25-hIgG1wtLambda_LCDR1_DNA

SEQ ID NO: 694 - DNA, 21 bp, Artificial Sequence
  TPP-29597_18206-gl11-gl25-hIgG1wtLambda_LCDR2_DNA
accaacaacagacggcccagc

SEQ ID NO: 695 - DNA, 33 bp, Artificial Sequence; identical to SEQ ID NO: 434
  TPP-29597_18206-gl11-gl25-hIgG1wtLambda_LCDR3_DNA

SEQ ID NO: 696 - protein, 452 aa, Artificial Sequence; identical to SEQ ID NO: 633
  TPP-29597_18206-gl11-gl25-hIgG1wtLambda_HC_PRT

SEQ ID NO: 697 - protein, 217 aa, Artificial Sequence
  TPP-29597_18206-gl11-gl25-hIgG1wtLambda_LC_PRT
QSVLTQPPSASGAPGQRVTISCTGSSSNIGAGYNVHWYQQLPGTAPKLLIYTNNRRPSGVPDRFSGSKSGTSASLAISGLRSEDEADYYCAAWDASLSGWVFGGGTKLTVLGQPKAAPSVTLFPPSSEELQANKATLVCLISDFYPGAVTVAWKADSSPVKAGVETTTPSKQSNNKYAASSYLSLTPEQWKSHRSYSCQVTHEGSTVEKTVAPTECS

SEQ ID NO: 698 - DNA, 1356 bp, Artificial Sequence
  TPP-29597_18206-gl11-gl25-hIgG1wtLambda_HC_DNA
gaagttcagctgctggaatctggcggcggactggttcaacctggcggatctctgagactgagctgtgccgccagcggcttcacctttagcagctatggcatgcactgggtccgacaggcccctggcaaaggacttgaatgggtgtccgccatcaactggaatggcggctctacaggctacgccgactctgtgaagggcagattcaccatcagccgggacaacagcaagaacaccctgtacctgcagatgaactccctgagagccgaggacaccgccgtgtactattgtgccagaggccaccacagcggctacgacggcagattctttgactattggggccagggcaccctggtcacagtttcttcagccagcaccaagggccccagcgtgttccctctggcccctagcagcaagagcacatctggcggaacagccgccctgggctgcctcgtgaaggactactttcccgagcccgtgaccgtgtcctggaactctggcgctctgacaagcggcgtgcacacctttccagccgtgctgcagagcagcggcctgtactctctgagcagcgtcgtgacagtgcccagcagctctctgggcacccagacctacatctgcaacgtgaaccacaagcccagcaacaccaaggtggacaagaaggtggaacccaagagctgcgacaagacccacacctgtcccccttgtcctgcccccgaactgctgggaggcccttccgtgttcctgttccccccaaagcccaaggacaccctgatgatcagccggacccccgaagtgacctgcgtggtggtggatgtgtcccacgaggaccctgaagtgaagttcaattggtacgtggacggcgtggaagtgcacaacgccaagaccaagcctagagaggaacagtacaacagcacctaccgggtggtgtccgtgctgacagtgctgcaccaggactggctgaacggcaaagagtacaagtgcaaggtgtccaacaaggccctgcctgcccccatcgagaaaaccatcagcaaggccaagggccagccccgcgaaccccaggtgtacacactgcccccaagcagggacgagctgaccaagaaccaggtgtccctgacctgtctcgtgaaaggcttctacccctccgatatcgccgtggaatgggagagcaacggccagcccgagaacaactacaagaccaccccccctgtgctggacagcgacggctcattcttcctgtacagcaagctgaccgtggacaagtcccggtggcagcagggcaacgtgttcagctgcagcgtgatgcacgaggccctgcacaaccactacacccagaagtccctgagcctgagccctggcaag

SEQ ID NO: 699 - DNA, 651 bp, Artificial Sequence
  TPP-29597_18206-gl11-gl25-hIgG1wtLambda_LC_DNA
cagtctgttctgacacagcctccatctgctagcggagcccctggacagagagtgaccatcagctgtacaggcagcagctccaatatcggagccggctacaacgtgcactggtatcagcagctgcctggcacagcccctaaactgctgatctacaccaacaacagacggcccagcggcgtgcccgatagattttctggcagcaagagcggcacaagcgccagcctggctatctctggactgagatctgaggacgaggccgactactattgcgccgcctgggatgcttctctgagcggatgggttttcggcggaggcaccaaactgacagtgctaggccagcctaaagccgcccctagcgtgaccctgttccctccaagcagcgaggaactgcaggccaacaaggccaccctcgtgtgcctgatcagcgacttctatcctggcgccgtgaccgtggcctggaaggccgatagctctcctgtgaaggccggcgtggaaaccaccacccctagcaagcagagcaacaacaaatacgccgccagcagctacctgagcctgacccccgagcagtggaagtcccacagatcctacagctgccaagtgacccacgagggcagcaccgtggaaaagacagtggcccctaccgagtgcagc

SEQ ID NO: 700 - DNA, 1353 bp, Artificial Sequence
  TPP-18206_002-F01_497A-M281-P02+497A-M317-O07-hIgG1Lambda_HC_DNA
gaagttcagctgctggaatctggcggcggactggttcaacctggcggatctctgagactgagctgtgccgccagcggcttcacctttagccactatggcatgcactgggtccgacaggcccctggcaaaggacttgaatgggtgtccggcatcaactggaatggcggctctacaggctacgccgactctgtgaagggcagattcaccatcagccgggacaacagcaagaacaccctgtacctgcagatgaactccctgagagccgaggacaccgccgtgtactattgtgccagaggccaccacagcggctacgacggcagattctttgactattggggccagggcaccctggtcacagtttcttcagccagcaccaagggccccagcgtgttccctctggcccctagcagcaagagcacatctggcggaacagccgccctgggctgcctcgtgaaggactactttcccgagcccgtgaccgtgtcctggaactctggcgctctgacaagcggcgtgcacacctttccagccgtgctgcagagcagcggcctgtactctctgagcagcgtcgtgacagtgcccagcagctctctgggcacccagacctacatctgcaacgtgaaccacaagcccagcaacaccaaggtggacaagaaggtggaacccaagagctgcgacaagacccacacctgtcccccttgtcctgcccccgaactgctgggaggcccttccgtgttcctgttccccccaaagcccaaggacaccctgatgatcagccggacccccgaagtgacctgcgtggtggtggatgtgtcccacgaggaccctgaagtgaagttcaattggtacgtggacggcgtggaagtgcacaacgccaagaccaagcctagagaggaacagtacaacagcacctaccgggtggtgtccgtgctgacagtgctgcaccaggactggctgaacggcaaagagtacaagtgcaaggtgtccaacaaggccctgcctgcccccatcgagaaaaccatcagcaaggccaagggccagccccgcgaaccccaggtgtacacactgcccccaagcagggacgagctgaccaagaaccaggtgtccctgacctgtctcgtgaaaggcttctacccctccgatatcgccgtggaatgggagagcaacggccagcccgagaacaactacaagaccaccccccctgtgctggacagcgacggctcattcttcctgtacagcaagctgaccgtggacaagtcccggtggcagcagggcaacgtgttcagctgcagcgtgatgcacgaggccctgcacaaccactacacccagaagtccctgagcctgagccctggc

SEQ ID NO: 701 - DNA, 651 bp, Artificial Sequence
  TPP-18206_002-F01_497A-M281-P02+497A-M317-O07-hIgG1Lambda_LC_DNA
cagtctgttctgacacagcctcctagcgcctctggcacacctggacagagagtgaccatcagctgtaccggcagcagctccaatatcggagccggctacaacgtgcactggtatcagcagctgcctggcacagcccctaaactgctgatctacaccaacaacagacggcccagcggcgtgcccgatagattttctggcagcaagagcggcacaagcgccagcctggctatctctggactgagatctgaggacgaggccgactactattgcgccgcctgggatgcttctctgagcggatgggttttcggcggaggcaccaaactgacagtgctaggccagcctaaagccgcccctagcgtgaccctgttccctccaagcagcgaggaactgcaggccaacaaggccaccctcgtgtgcctgatcagcgacttctatcctggcgccgtgaccgtggcctggaaggccgatagctctcctgtgaaggccggcgtggaaaccaccacccctagcaagcagagcaacaacaaatacgccgccagcagctacctgagcctgacccccgagcagtggaagtcccacagatcctacagctgccaagtgacccacgagggcagcaccgtggaaaagacagtggcccctaccgagtgcagc

SEQ ID NO: 702 - protein, 122 aa, Artificial Sequence; identical to SEQ ID NO: 419
  TPP-18429_18206-gl10-hIgG1Lambda_VH_PRT

SEQ ID NO: 703 - protein, 5 aa, Artificial Sequence
  TPP-18429_18206-gl10-hIgG1Lambda_HCDR1_PRT
HYGMH

SEQ ID NO: 704 - protein, 17 aa, Artificial Sequence
  TPP-18429_18206-gl10-hIgG1Lambda_HCDR2_PRT
GINWNGGSTGYADSVKG

SEQ ID NO: 705 - protein, 13 aa, Artificial Sequence
  TPP-18429_18206-gl10-hIgG1Lambda_HCDR3_PRT
GHHSGYDGRFFDY

SEQ ID NO: 706 - protein, 111 aa, Artificial Sequence
  TPP-18429_18206-gl10-hIgG1Lambda_VL_PRT
QSVLTQPPSVSGTPGQRVTISCTGSSSNIGAGYNVHWYQQLPGTAPKLLIYTNNRRPSGVPDRFSGSKSGTSASLAISGLRSEDEADYYCAAWDASLSGWVFGGGTKLTVL

SEQ ID NO: 707 - protein, 14 aa, Artificial Sequence
  TPP-18429_18206-gl10-hIgG1Lambda_LCDR1_PRT
TGSSSNIGAGYNVH

SEQ ID NO: 708 - protein, 7 aa, Artificial Sequence
  TPP-18429_18206-gl10-hIgG1Lambda_LCDR2_PRT
TNNRRPS

SEQ ID NO: 709 - protein, 11 aa, Artificial Sequence
  TPP-18429_18206-gl10-hIgG1Lambda_LCDR3_PRT
AAWDASLSGWV

SEQ ID NO: 710 - DNA, 366 bp, Artificial Sequence; identical to SEQ ID NO: 427
  TPP-18429_18206-gl10-hIgG1Lambda_VH_DNA

SEQ ID NO: 711 - DNA, 15 bp, Artificial Sequence
  TPP-18429_18206-gl10-hIgG1Lambda_HCDR1_DNA
cactatggcatgcac

SEQ ID NO: 712 - DNA, 51 bp, Artificial Sequence; identical to SEQ ID NO: 429
  TPP-18429_18206-gl10-hIgG1Lambda_HCDR2_DNA

SEQ ID NO: 713 - DNA, 39 bp, Artificial Sequence; identical to SEQ ID NO: 430
  TPP-18429_18206-gl10-hIgG1Lambda_HCDR3_DNA

SEQ ID NO: 714 - DNA, 333 bp, Artificial Sequence
  TPP-18429_18206-gl10-hIgG1Lambda_VL_DNA
cagtctgttctgacacagcctccatccgtgtctggcacacctggccagagagtgaccatcagctgtaccggcagcagctccaatatcggagccggctacaacgtgcactggtatcagcagctgcctggcacagcccctaaactgctgatctacaccaacaacagacggcccagcggcgtgcccgatagattttctggctctaagagcggcaccagcgccagcctggctatctctggactgagatctgaggacgaggccgactactattgcgccgcctgggatgcttctctgagcggatgggttttcggcggaggcaccaaactgacagtgcta

SEQ ID NO: 715 - DNA, 42 bp, Artificial Sequence; identical to SEQ ID NO: 432
  TPP-18429_18206-gl10-hIgG1Lambda_LCDR1_DNA

SEQ ID NO: 716 - DNA, 21 bp, Artificial Sequence
  TPP-18429_18206-gl10-hIgG1Lambda_LCDR2_DNA
accaacaacagacggcccagc

SEQ ID NO: 717 - DNA, 33 bp, Artificial Sequence; identical to SEQ ID NO: 434
  TPP-18429_18206-gl10-hIgG1Lambda_LCDR3_DNA

SEQ ID NO: 718 - protein, 451 aa, Artificial Sequence; identical to SEQ ID NO: 435
  TPP-18429_18206-gl10-hIgG1Lambda_HC_PRT

SEQ ID NO: 719 - protein, 217 aa, Artificial Sequence
  TPP-18429_18206-gl10-hIgG1Lambda_LC_PRT
QSVLTQPPSVSGTPGQRVTISCTGSSSNIGAGYNVHWYQQLPGTAPKLLIYTNNRRPSGVPDRFSGSKSGTSASLAISGLRSEDEADYYCAAWDASLSGWVFGGGTKLTVLGQPKAAPSVTLFPPSSEELQANKATLVCLISDFYPGAVTVAWKADSSPVKAGVETTTPSKQSNNKYAASSYLSLTPEQWKSHRSYSCQVTHEGSTVEKTVAPTECS

SEQ ID NO: 720 - DNA, 1353 bp, Artificial Sequence; identical to SEQ ID NO: 700
  TPP-18429_18206-gl10-hIgG1Lambda_HC_DNA

SEQ ID NO: 721 - DNA, 651 bp, Artificial Sequence
  TPP-18429_18206-gl10-hIgG1Lambda_LC_DNA
cagtctgttctgacacagcctccatccgtgtctggcacacctggccagagagtgaccatcagctgtaccggcagcagctccaatatcggagccggctacaacgtgcactggtatcagcagctgcctggcacagcccctaaactgctgatctacaccaacaacagacggcccagcggcgtgcccgatagattttctggctctaagagcggcaccagcgccagcctggctatctctggactgagatctgaggacgaggccgactactattgcgccgcctgggatgcttctctgagcggatgggttttcggcggaggcaccaaactgacagtgctaggccagcctaaagccgcccctagcgtgaccctgttccctccaagcagcgaggaactgcaggccaacaaggccaccctcgtgtgcctgatcagcgacttctatcctggcgccgtgaccgtggcctggaaggccgatagctctcctgtgaaggccggcgtggaaaccaccacccctagcaagcagagcaacaacaaatacgccgccagcagctacctgagcctgacccccgagcagtggaagtcccacagatcctacagctgccaagtgacccacgagggcagcaccgtggaaaagacagtggcccctaccgagtgcagc

SEQ ID NO: 722 - protein, 122 aa, Artificial Sequence; identical to SEQ ID NO: 419
  TPP-18430_18206-gl11-hIgG1Lambda_VH_PRT

SEQ ID NO: 723 - protein, 5 aa, Artificial Sequence
  TPP-18430_18206-gl11-hIgG1Lambda_HCDR1_PRT
HYGMH

SEQ ID NO: 724 - protein, 17 aa, Artificial Sequence
  TPP-18430_18206-gl11-hIgG1Lambda_HCDR2_PRT
GINWNGGSTGYADSVKG

SEQ ID NO: 725 - protein, 13 aa, Artificial Sequence
  TPP-18430_18206-gl11-hIgG1Lambda_HCDR3_PRT
GHHSGYDGRFFDY

SEQ ID NO: 726 - protein, 111 aa, Artificial Sequence; identical to SEQ ID NO: 684
  TPP-18430_18206-gl11-hIgG1Lambda_VL_PRT

SEQ ID NO: 727 - protein, 14 aa, Artificial Sequence
  TPP-18430_18206-gl11-hIgG1Lambda_LCDR1_PRT
TGSSSNIGAGYNVH

SEQ ID NO: 728 - protein, 7 aa, Artificial Sequence
  TPP-18430_18206-gl11-hIgG1Lambda_LCDR2_PRT
TNNRRPS

SEQ ID NO: 729 - protein, 11 aa, Artificial Sequence
  TPP-18430_18206-gl11-hIgG1Lambda_LCDR3_PRT
AAWDASLSGWV

SEQ ID NO: 730 - DNA, 366 bp, Artificial Sequence; identical to SEQ ID NO: 427
  TPP-18430_18206-gl11-hIgG1Lambda_VH_DNA

SEQ ID NO: 731 - DNA, 15 bp, Artificial Sequence
  TPP-18430_18206-gl11-hIgG1Lambda_HCDR1_DNA
cactatggcatgcac

SEQ ID NO: 732 - DNA, 51 bp, Artificial Sequence; identical to SEQ ID NO: 429
  TPP-18430_18206-gl11-hIgG1Lambda_HCDR2_DNA

SEQ ID NO: 733 - DNA, 39 bp, Artificial Sequence; identical to SEQ ID NO: 430
  TPP-18430_18206-gl11-hIgG1Lambda_HCDR3_DNA

SEQ ID NO: 734 - DNA, 333 bp, Artificial Sequence; identical to SEQ ID NO: 692
  TPP-18430_18206-gl11-hIgG1Lambda_VL_DNA

SEQ ID NO: 735 - DNA, 42 bp, Artificial Sequence; identical to SEQ ID NO: 486
  TPP-18430_18206-gl11-hIgG1Lambda_LCDR1_DNA

SEQ ID NO: 736 - DNA, 21 bp, Artificial Sequence
  TPP-18430_18206-gl11-hIgG1Lambda_LCDR2_DNA
accaacaacagacggcccagc

SEQ ID NO: 737 - DNA, 33 bp, Artificial Sequence; identical to SEQ ID NO: 434
  TPP-18430_18206-gl11-hIgG1Lambda_LCDR3_DNA

SEQ ID NO: 738 - protein, 451 aa, Artificial Sequence; identical to SEQ ID NO: 435
  TPP-18430_18206-gl11-hIgG1Lambda_HC_PRT

SEQ ID NO: 739 - protein, 217 aa, Artificial Sequence; identical to SEQ ID NO: 697
  TPP-18430_18206-gl11-hIgG1Lambda_LC_PRT

SEQ ID NO: 740 - DNA, 1353 bp, Artificial Sequence; identical to SEQ ID NO: 700
  TPP-18430_18206-gl11-hIgG1Lambda_HC_DNA

SEQ ID NO: 741 - DNA, 651 bp, Artificial Sequence; identical to SEQ ID NO: 699
  TPP-18430_18206-gl11-hIgG1Lambda_LC_DNA

SEQ ID NO: 742 - protein, 122 aa, Artificial Sequence; identical to SEQ ID NO: 419
  TPP-18432_18206-gl13-hIgG1Lambda_VH_PRT

SEQ ID NO: 743 - protein, 5 aa, Artificial Sequence
  TPP-18432_18206-gl13-hIgG1Lambda_HCDR1_PRT
HYGMH

SEQ ID NO: 744 - protein, 17 aa, Artificial Sequence
  TPP-18432_18206-gl13-hIgG1Lambda_HCDR2_PRT
GINWNGGSTGYADSVKG

SEQ ID NO: 745 - protein, 13 aa, Artificial Sequence
  TPP-18432_18206-gl13-hIgG1Lambda_HCDR3_PRT
GHHSGYDGRFFDY

SEQ ID NO: 746 - protein, 111 aa, Artificial Sequence; identical to SEQ ID NO: 477
  TPP-18432_18206-gl13-hIgG1Lambda_VL_PRT

SEQ ID NO: 747 - protein, 14 aa, Artificial Sequence
  TPP-18432_18206-gl13-hIgG1Lambda_LCDR1_PRT
TGSSSNIGAGYNVH

SEQ ID NO: 748 - protein, 7 aa, Artificial Sequence
  TPP-18432_18206-gl13-hIgG1Lambda_LCDR2_PRT
TNNRRPS

SEQ ID NO: 749 - protein, 11 aa, Artificial Sequence
  TPP-18432_18206-gl13-hIgG1Lambda_LCDR3_PRT
AAWDASLSGWV

SEQ ID NO: 750 - DNA, 366 bp, Artificial Sequence; identical to SEQ ID NO: 427
  TPP-18432_18206-gl13-hIgG1Lambda_VH_DNA

SEQ ID NO: 751 - DNA, 15 bp, Artificial Sequence
  TPP-18432_18206-gl13-hIgG1Lambda_HCDR1_DNA
cactatggcatgcac

SEQ ID NO: 752 - DNA, 51 bp, Artificial Sequence; identical to SEQ ID NO: 429
  TPP-18432_18206-gl13-hIgG1Lambda_HCDR2_DNA

SEQ ID NO: 753 - DNA, 39 bp, Artificial Sequence; identical to SEQ ID NO: 430
  TPP-18432_18206-gl13-hIgG1Lambda_HCDR3_DNA

SEQ ID NO: 754 - DNA, 333 bp, Artificial Sequence; identical to SEQ ID NO: 485
  TPP-18432_18206-gl13-hIgG1Lambda_VL_DNA

SEQ ID NO: 755 - DNA, 42 bp, Artificial Sequence; identical to SEQ ID NO: 486
  TPP-18432_18206-gl13-hIgG1Lambda_LCDR1_DNA

SEQ ID NO: 756 - DNA, 21 bp, Artificial Sequence
  TPP-18432_18206-gl13-hIgG1Lambda_LCDR2_DNA
accaacaacagacggcccagc

SEQ ID NO: 757 - DNA, 33 bp, Artificial Sequence; identical to SEQ ID NO: 434
  TPP-18432_18206-gl13-hIgG1Lambda_LCDR3_DNA

SEQ ID NO: 758 - protein, 451 aa, Artificial Sequence; identical to SEQ ID NO: 435
  TPP-18432_18206-gl13-hIgG1Lambda_HC_PRT

SEQ ID NO: 759 - protein, 217 aa, Artificial Sequence; identical to SEQ ID NO: 490
  TPP-18432_18206-gl13-hIgG1Lambda_LC_PRT

SEQ ID NO: 760 - DNA, 1353 bp, Artificial Sequence; identical to SEQ ID NO: 700
  TPP-18432_18206-gl13-hIgG1Lambda_HC_DNA

SEQ ID NO: 761 - DNA, 651 bp, Artificial Sequence; identical to SEQ ID NO: 679
  TPP-18432_18206-gl13-hIgG1Lambda_LC_DNA

SEQ ID NO: 762 - protein, 122 aa, Artificial Sequence; identical to SEQ ID NO: 660
  TPP-18433_18206-gl14-hIgG1Lambda_VH_PRT

SEQ ID NO: 763 - protein, 5 aa, Artificial Sequence
  TPP-18433_18206-gl14-hIgG1Lambda_HCDR1_PRT
SYGMH

SEQ ID NO: 764 - protein, 17 aa, Artificial Sequence
  TPP-18433_18206-gl14-hIgG1Lambda_HCDR2_PRT
GINWNGGSTGYADSVKG

SEQ ID NO: 765 - protein, 13 aa, Artificial Sequence
  TPP-18433_18206-gl14-hIgG1Lambda_HCDR3_PRT
GHHSGYDGRFFDY

SEQ ID NO: 766 - protein, 111 aa, Artificial Sequence; identical to SEQ ID NO: 423
  TPP-18433_18206-gl14-hIgG1Lambda_VL_PRT

SEQ ID NO: 767 - protein, 14 aa, Artificial Sequence
  TPP-18433_18206-gl14-hIgG1Lambda_LCDR1_PRT
TGSSSNIGAGYNVH

SEQ ID NO: 768 - protein, 7 aa, Artificial Sequence
  TPP-18433_18206-gl14-hIgG1Lambda_LCDR2_PRT
TNNRRPS

SEQ ID NO: 769 - protein, 11 aa, Artificial Sequence
  TPP-18433_18206-gl14-hIgG1Lambda_LCDR3_PRT
AAWDASLSGWV

SEQ ID NO: 770 - DNA, 366 bp, Artificial Sequence; identical to SEQ ID NO: 668
  TPP-18433_18206-gl14-hIgG1Lambda_VH_DNA

SEQ ID NO: 771 - DNA, 15 bp, Artificial Sequence
  TPP-18433_18206-gl14-hIgG1Lambda_HCDR1_DNA
agctatggcatgcac

SEQ ID NO: 772 - DNA, 51 bp, Artificial Sequence; identical to SEQ ID NO: 429
  TPP-18433_18206-gl14-hIgG1Lambda_HCDR2_DNA

SEQ ID NO: 773 - DNA, 39 bp, Artificial Sequence; identical to SEQ ID NO: 430
  TPP-18433_18206-gl14-hIgG1Lambda_HCDR3_DNA

SEQ ID NO: 774 - DNA, 333 bp, Artificial Sequence; identical to SEQ ID NO: 431
  TPP-18433_18206-gl14-hIgG1Lambda_VL_DNA

SEQ ID NO: 775 - DNA, 42 bp, Artificial Sequence; identical to SEQ ID NO: 432
  TPP-18433_18206-gl14-hIgG1Lambda_LCDR1_DNA

SEQ ID NO: 776 - DNA, 21 bp, Artificial Sequence
  TPP-18433_18206-gl14-hIgG1Lambda_LCDR2_DNA
accaacaacagacggcccagc

SEQ ID NO: 777 - DNA, 33 bp, Artificial Sequence; identical to SEQ ID NO: 434
  TPP-18433_18206-gl14-hIgG1Lambda_LCDR3_DNA

SEQ ID NO: 778 - protein, 451 aa, Artificial Sequence
  TPP-18433_18206-gl14-hIgG1Lambda_HC_PRT
EVQLLESGGGLVQPGGSLRLSCAASGFTFSSYGMHWVRQAPGKGLEWVSGINWNGGSTGYADSVKGRFTISRDNSKNTLYLQMNSLRAEDTAVYYCARGHHSGYDGRFFDYWGQGTLVTVSSASTKGPSVFPLAPSSKSTSGGTAALGCLVKDYFPEPVTVSWNSGALTSGVHTFPAVLQSSGLYSLSSVVTVPSSSLGTQTYICNVNHKPSNTKVDKKVEPKSCDKTHTCPPCPAPELLGGPSVFLFPPKPKDTLMISRTPEVTCVVVDVSHEDPEVKFNWYVDGVEVHNAKTKPREEQYNSTYRVVSVLTVLHQDWLNGKEYKCKVSNKALPAPIEKTISKAKGQPREPQVYTLPPSRDELTKNQVSLTCLVKGFYPSDIAVEWESNGQPENNYKTTPPVLDSDGSFFLYSKLTVDKSRWQQGNVFSCSVMHEALHNHYTQKSLSLSPG

SEQ ID NO: 779 - protein, 217 aa, Artificial Sequence; identical to SEQ ID NO: 436
  TPP-18433_18206-gl14-hIgG1Lambda_LC_PRT

SEQ ID NO: 780 - DNA, 1353 bp, Artificial Sequence
  TPP-18433_18206-gl14-hIgG1Lambda_HC_DNA
gaagttcagctgctggaatctggcggcggactggttcaacctggcggatctctgagactgagctgtgccgccagcggcttcacctttagcagctatggcatgcactgggtccgacaggcccctggcaaaggacttgaatgggtgtccggcatcaactggaatggcggctctacaggctacgccgactctgtgaagggcagattcaccatcagccgggacaacagcaagaacaccctgtacctgcagatgaactccctgagagccgaggacaccgccgtgtactattgtgccagaggccaccacagcggctacgacggcagattctttgactattggggccagggcaccctggtcacagtttcttcagccagcaccaagggccccagcgtgttccctctggcccctagcagcaagagcacatctggcggaacagccgccctgggctgcctcgtgaaggactactttcccgagcccgtgaccgtgtcctggaactctggcgctctgacaagcggcgtgcacacctttccagccgtgctgcagagcagcggcctgtactctctgagcagcgtcgtgacagtgcccagcagctctctgggcacccagacctacatctgcaacgtgaaccacaagcccagcaacaccaaggtggacaagaaggtggaacccaagagctgcgacaagacccacacctgtcccccttgtcctgcccccgaactgctgggaggcccttccgtgttcctgttccccccaaagcccaaggacaccctgatgatcagccggacccccgaagtgacctgcgtggtggtggatgtgtcccacgaggaccctgaagtgaagttcaattggtacgtggacggcgtggaagtgcacaacgccaagaccaagcctagagaggaacagtacaacagcacctaccgggtggtgtccgtgctgacagtgctgcaccaggactggctgaacggcaaagagtacaagtgcaaggtgtccaacaaggccctgcctgcccccatcgagaaaaccatcagcaaggccaagggccagccccgcgaaccccaggtgtacacactgcccccaagcagggacgagctgaccaagaaccaggtgtccctgacctgtctcgtgaaaggcttctacccctccgatatcgccgtggaatgggagagcaacggccagcccgagaacaactacaagaccaccccccctgtgctggacagcgacggctcattcttcctgtacagcaagctgaccgtggacaagtcccggtggcagcagggcaacgtgttcagctgcagcgtgatgcacgaggccctgcacaaccactacacccagaagtccctgagcctgagccctggc

SEQ ID NO: 781 - DNA, 651 bp, Artificial Sequence; identical to SEQ ID NO: 701
  TPP-18433_18206-gl14-hIgG1Lambda_LC_DNA

SEQ ID NO: 782 - protein, 122 aa, Artificial Sequence
  TPP-18436_18206-gl17-hIgG1Lambda_VH_PRT
EVQLLESGGGLVQPGGSLRLSCAASGFTFSHYGMHWVRQAPGKGLEWVSAINWNGGSTGYADSVKGRFTISRDNSKNTLYLQMNSLRAEDTAVYYCARGHHSGYDGRFFDYWGQGTLVTVSS

SEQ ID NO: 783 - protein, 5 aa, Artificial Sequence
  TPP-18436_18206-gl17-hIgG1Lambda_HCDR1_PRT
HYGMH

SEQ ID NO: 784 - protein, 17 aa, Artificial Sequence
  TPP-18436_18206-gl17-hIgG1Lambda_HCDR2_PRT
AINWNGGSTGYADSVKG

SEQ ID NO: 785 - protein, 13 aa, Artificial Sequence
  TPP-18436_18206-gl17-hIgG1Lambda_HCDR3_PRT
GHHSGYDGRFFDY

SEQ ID NO: 786 - protein, 111 aa, Artificial Sequence; identical to SEQ ID NO: 423
  TPP-18436_18206-gl17-hIgG1Lambda_VL_PRT

SEQ ID NO: 787 - protein, 14 aa, Artificial Sequence
  TPP-18436_18206-gl17-hIgG1Lambda_LCDR1_PRT
TGSSSNIGAGYNVH

SEQ ID NO: 788 - protein, 7 aa, Artificial Sequence
  TPP-18436_18206-gl17-hIgG1Lambda_LCDR2_PRT
TNNRRPS

SEQ ID NO: 789 - protein, 11 aa, Artificial Sequence
  TPP-18436_18206-gl17-hIgG1Lambda_LCDR3_PRT
AAWDASLSGWV

SEQ ID NO: 790 - DNA, 366 bp, Artificial Sequence
  TPP-18436_18206-gl17-hIgG1Lambda_VH_DNA
gaagttcagctgctggaatctggcggcggactggttcaacctggcggatctctgagactgagctgtgccgccagcggcttcacctttagccactatggcatgcactgggtccgacaggcccctggcaaaggacttgaatgggtgtccgccatcaactggaatggcggctctacaggctacgccgactctgtgaagggcagattcaccatcagccgggacaacagcaagaacaccctgtacctgcagatgaactccctgagagccgaggacaccgccgtgtactattgtgccagaggccaccacagcggctacgacggcagattctttgactattggggccagggcaccctggtcacagtttcttca

SEQ ID NO: 791 - DNA, 15 bp, Artificial Sequence
  TPP-18436_18206-gl17-hIgG1Lambda_HCDR1_DNA
cactatggcatgcac

SEQ ID NO: 792 - DNA, 51 bp, Artificial Sequence; identical to SEQ ID NO: 609
  TPP-18436_18206-gl17-hIgG1Lambda_HCDR2_DNA

SEQ ID NO: 793 - DNA, 39 bp, Artificial Sequence; identical to SEQ ID NO: 430
  TPP-18436_18206-gl17-hIgG1Lambda_HCDR3_DNA

SEQ ID NO: 794 - DNA, 333 bp, Artificial Sequence; identical to SEQ ID NO: 431
  TPP-18436_18206-gl17-hIgG1Lambda_VL_DNA

SEQ ID NO: 795 - DNA, 42 bp, Artificial Sequence; identical to SEQ ID NO: 432
  TPP-18436_18206-gl17-hIgG1Lambda_LCDR1_DNA

SEQ ID NO: 796 - DNA, 21 bp, Artificial Sequence
  TPP-18436_18206-gl17-hIgG1Lambda_LCDR2_DNA
accaacaacagacggcccagc

SEQ ID NO: 797 - DNA, 33 bp, Artificial Sequence; identical to SEQ ID NO: 434
  TPP-18436_18206-gl17-hIgG1Lambda_LCDR3_DNA

SEQ ID NO: 798 - protein, 451 aa, Artificial Sequence
  TPP-18436_18206-gl17-hIgG1Lambda_HC_PRT
EVQLLESGGGLVQPGGSLRLSCAASGFTFSHYGMHWVRQAPGKGLEWVSAINWNGGSTGYADSVKGRFTISRDNSKNTLYLQMNSLRAEDTAVYYCARGHHSGYDGRFFDYWGQGTLVTVSSASTKGPSVFPLAPSSKSTSGGTAALGCLVKDYFPEPVTVSWNSGALTSGVHTFPAVLQSSGLYSLSSVVTVPSSSLGTQTYICNVNHKPSNTKVDKKVEPKSCDKTHTCPPCPAPELLGGPSVFLFPPKPKDTLMISRTPEVTCVVVDVSHEDPEVKFNWYVDGVEVHNAKTKPREEQYNSTYRVVSVLTVLHQDWLNGKEYKCKVSNKALPAPIEKTISKAKGQPREPQVYTLPPSRDELTKNQVSLTCLVKGFYPSDIAVEWESNGQPENNYKTTPPVLDSDGSFFLYSKLTVDKSRWQQGNVFSCSVMHEALHNHYTQKSLSLSPG

SEQ ID NO: 799 - protein, 217 aa, Artificial Sequence; identical to SEQ ID NO: 436
  TPP-18436_18206-gl17-hIgG1Lambda_LC_PRT

SEQ ID NO: 800 - DNA, 1353 bp, Artificial Sequence
  TPP-18436_18206-gl17-hIgG1Lambda_HC_DNA
gaagttcagctgctggaatctggcggcggactggttcaacctggcggatctctgagactgagctgtgccgccagcggcttcacctttagccactatggcatgcactgggtccgacaggcccctggcaaaggacttgaatgggtgtccgccatcaactggaatggcggctctacaggctacgccgactctgtgaagggcagattcaccatcagccgggacaacagcaagaacaccctgtacctgcagatgaactccctgagagccgaggacaccgccgtgtactattgtgccagaggccaccacagcggctacgacggcagattctttgactattggggccagggcaccctggtcacagtttcttcagccagcaccaagggccccagcgtgttccctctggcccctagcagcaagagcacatctggcggaacagccgccctgggctgcctcgtgaaggactactttcccgagcccgtgaccgtgtcctggaactctggcgctctgacaagcggcgtgcacacctttccagccgtgctgcagagcagcggcctgtactctctgagcagcgtcgtgacagtgcccagcagctctctgggcacccagacctacatctgcaacgtgaaccacaagcccagcaacaccaaggtggacaagaaggtggaacccaagagctgcgacaagacccacacctgtcccccttgtcctgcccccgaactgctgggaggcccttccgtgttcctgttccccccaaagcccaaggacaccctgatgatcagccggacccccgaagtgacctgcgtggtggtggatgtgtcccacgaggaccctgaagtgaagttcaattggtacgtggacggcgtggaagtgcacaacgccaagaccaagcctagagaggaacagtacaacagcacctaccgggtggtgtccgtgctgacagtgctgcaccaggactggctgaacggcaaagagtacaagtgcaaggtgtccaacaaggccctgcctgcccccatcgagaaaaccatcagcaaggccaagggccagccccgcgaaccccaggtgtacacactgcccccaagcagggacgagctgaccaagaaccaggtgtccctgacctgtctcgtgaaaggcttctacccctccgatatcgccgtggaatgggagagcaacggccagcccgagaacaactacaagaccaccccccctgtgctggacagcgacggctcattcttcctgtacagcaagctgaccgtggacaagtcccggtggcagcagggcaacgtgttcagctgcagcgtgatgcacgaggccctgcacaaccactacacccagaagtccctgagcctgagccctggc

SEQ ID NO: 801 - DNA, 651 bp, Artificial Sequence; identical to SEQ ID NO: 701
  TPP-18436_18206-gl17-hIgG1Lambda_LC_DNA

SEQ ID NO: 802 - protein, 122 aa, Artificial Sequence; identical to SEQ ID NO: 599
  TPP-19571_18206-gl25-hIgG1Lambda_VH_PRT

SEQ ID NO: 803 - protein, 5 aa, Artificial Sequence
  TPP-19571_18206-gl25-hIgG1Lambda_HCDR1_PRT
SYGMH

SEQ ID NO: 804 - protein, 17 aa, Artificial Sequence
  TPP-19571_18206-gl25-hIgG1Lambda_HCDR2_PRT
AINWNGGSTGYADSVKG

SEQ ID NO: 805 - protein, 13 aa, Artificial Sequence
  TPP-19571_18206-gl25-hIgG1Lambda_HCDR3_PRT
GHHSGYDGRFFDY

SEQ ID NO: 806 - protein, 111 aa, Artificial Sequence; identical to SEQ ID NO: 423
  TPP-19571_18206-gl25-hIgG1Lambda_VL_PRT

SEQ ID NO: 807 - protein, 14 aa, Artificial Sequence
  TPP-19571_18206-gl25-hIgG1Lambda_LCDR1_PRT
TGSSSNIGAGYNVH

SEQ ID NO: 808 - protein, 7 aa, Artificial Sequence
  TPP-19571_18206-gl25-hIgG1Lambda_LCDR2_PRT
TNNRRPS

SEQ ID NO: 809 - protein, 11 aa, Artificial Sequence
  TPP-19571_18206-gl25-hIgG1Lambda_LCDR3_PRT
AAWDASLSGWV

SEQ ID NO: 810 - DNA, 366 bp, Artificial Sequence; identical to SEQ ID NO: 607
  TPP-19571_18206-gl25-hIgG1Lambda_VH_DNA

SEQ ID NO: 811 - DNA, 15 bp, Artificial Sequence
  TPP-19571_18206-gl25-hIgG1Lambda_HCDR1_DNA
agctatggcatgcac

SEQ ID NO: 812 - DNA, 51 bp, Artificial Sequence; identical to SEQ ID NO: 609
  TPP-19571_18206-gl25-hIgG1Lambda_HCDR2_DNA

SEQ ID NO: 813 - DNA, 39 bp, Artificial Sequence; identical to SEQ ID NO: 430
  TPP-19571_18206-gl25-hIgG1Lambda_HCDR3_DNA

SEQ ID NO: 814 - DNA, 333 bp, Artificial Sequence; identical to SEQ ID NO: 431
  TPP-19571_18206-gl25-hIgG1Lambda_VL_DNA

SEQ ID NO: 815 - DNA, 42 bp, Artificial Sequence; identical to SEQ ID NO: 432
  TPP-19571_18206-gl25-hIgG1Lambda_LCDR1_DNA

SEQ ID NO: 816 - DNA, 21 bp, Artificial Sequence
  TPP-19571_18206-gl25-hIgG1Lambda_LCDR2_DNA
accaacaacagacggcccagc

SEQ ID NO: 817 - DNA, 33 bp, Artificial Sequence; identical to SEQ ID NO: 434
  TPP-19571_18206-gl25-hIgG1Lambda_LCDR3_DNA

SEQ ID NO: 818 - protein, 451 aa, Artificial Sequence; identical to SEQ ID NO: 615
  TPP-19571_18206-gl25-hIgG1Lambda_HC_PRT

SEQ ID NO: 819 - protein, 217 aa, Artificial Sequence; identical to SEQ ID NO: 436
  TPP-19571_18206-gl25-hIgG1Lambda_LC_PRT

SEQ ID NO: 820 - DNA, 1353 bp, Artificial Sequence
  TPP-19571_18206-gl25-hIgG1Lambda_HC_DNA
gaagttcagctgctggaatctggcggcggactggttcaacctggcggatctctgagactgagctgtgccgccagcggcttcacctttagcagctatggcatgcactgggtccgacaggcccctggcaaaggacttgaatgggtgtccgccatcaactggaatggcggctctacaggctacgccgactctgtgaagggcagattcaccatcagccgggacaacagcaagaacaccctgtacctgcagatgaactccctgagagccgaggacaccgccgtgtactattgtgccagaggccaccacagcggctacgacggcagattctttgactattggggccagggcaccctggtcacagtttcttcagccagcaccaagggccccagcgtgttccctctggcccctagcagcaagagcacatctggcggaacagccgccctgggctgcctcgtgaaggactactttcccgagcccgtgaccgtgtcctggaactctggcgctctgacaagcggcgtgcacacctttccagccgtgctgcagagcagcggcctgtactctctgagcagcgtcgtgacagtgcccagcagctctctgggcacccagacctacatctgcaacgtgaaccacaagcccagcaacaccaaggtggacaagaaggtggaacccaagagctgcgacaagacccacacctgtcccccttgtcctgcccccgaactgctgggaggcccttccgtgttcctgttccccccaaagcccaaggacaccctgatgatcagccggacccccgaagtgacctgcgtggtggtggatgtgtcccacgaggaccctgaagtgaagttcaattggtacgtggacggcgtggaagtgcacaacgccaagaccaagcctagagaggaacagtacaacagcacctaccgggtggtgtccgtgctgacagtgctgcaccaggactggctgaacggcaaagagtacaagtgcaaggtgtccaacaaggccctgcctgcccccatcgagaaaaccatcagcaaggccaagggccagccccgcgaaccccaggtgtacacactgcccccaagcagggacgagctgaccaagaaccaggtgtccctgacctgtctcgtgaaaggcttctacccctccgatatcgccgtggaatgggagagcaacggccagcccgagaacaactacaagaccaccccccctgtgctggacagcgacggctcattcttcctgtacagcaagctgaccgtggacaagtcccggtggcagcagggcaacgtgttcagctgcagcgtgatgcacgaggccctgcacaaccactacacccagaagtccctgagcctgagccctggc

SEQ ID NO: 821 - DNA, 651 bp, Artificial Sequence; identical to SEQ ID NO: 701
  TPP-19571_18206-gl25-hIgG1Lambda_LC_DNA

SEQ ID NO: 822 - DNA, 1353 bp, Artificial Sequence; identical to SEQ ID NO: 820
  TPP-21360_18206-gl25-gl13-hIgG1Lambda_HC_DNA

SEQ ID NO: 823 - DNA, 651 bp, Artificial Sequence; identical to SEQ ID NO: 679
  TPP-21360_18206-gl25-gl13-hIgG1Lambda_LC_DNA

SEQ ID NO: 824 - DNA, 1356 bp, Artificial Sequence; identical to SEQ ID NO: 698
  TPP-23411_21360-hIgG1lambda_HC_DNA

SEQ ID NO: 825 - DNA, 651 bp, Artificial Sequence; identical to SEQ ID NO: 679
  TPP-23411_21360-hIgG1lambda_LC_DNA

SEQ ID NO: 826 - protein, 122 aa, Artificial Sequence; identical to SEQ ID NO: 599
  TPP-27477_18206-gl10-gl25-hIgG1Lambda_VH_PRT

SEQ ID NO: 827 - protein, 5 aa, Artificial Sequence
  TPP-27477_18206-gl10-gl25-hIgG1Lambda_HCDR1_PRT
SYGMH

SEQ ID NO: 828 - protein, 17 aa, Artificial Sequence
  TPP-27477_18206-gl10-gl25-hIgG1Lambda_HCDR2_PRT
AINWNGGSTGYADSVKG

SEQ ID NO: 829 - protein, 13 aa, Artificial Sequence
  TPP-27477_18206-gl10-gl25-hIgG1Lambda_HCDR3_PRT
GHHSGYDGRFFDY

SEQ ID NO: 830 - protein, 111 aa, Artificial Sequence; identical to SEQ ID NO: 706
  TPP-27477_18206-gl10-gl25-hIgG1Lambda_VL_PRT

SEQ ID NO: 831 - protein, 14 aa, Artificial Sequence
  TPP-27477_18206-gl10-gl25-hIgG1Lambda_LCDR1_PRT
TGSSSNIGAGYNVH

SEQ ID NO: 832 - protein, 7 aa, Artificial Sequence
  TPP-27477_18206-gl10-gl25-hIgG1Lambda_LCDR2_PRT
TNNRRPS

SEQ ID NO: 833 - protein, 11 aa, Artificial Sequence
  TPP-27477_18206-gl10-gl25-hIgG1Lambda_LCDR3_PRT
AAWDASLSGWV

SEQ ID NO: 834 - DNA, 366 bp, Artificial Sequence; identical to SEQ ID NO: 607
  TPP-27477_18206-gl10-gl25-hIgG1Lambda_VH_DNA

SEQ ID NO: 835 - DNA, 15 bp, Artificial Sequence
  TPP-27477_18206-gl10-gl25-hIgG1Lambda_HCDR1_DNA
agctatggcatgcac

SEQ ID NO: 836 - DNA, 51 bp, Artificial Sequence; identical to SEQ ID NO: 609
  TPP-27477_18206-gl10-gl25-hIgG1Lambda_HCDR2_DNA

SEQ ID NO: 837 - DNA, 39 bp, Artificial Sequence; identical to SEQ ID NO: 430
  TPP-27477_18206-gl10-gl25-hIgG1Lambda_HCDR3_DNA

SEQ ID NO: 838 - DNA, 333 bp, Artificial Sequence; identical to SEQ ID NO: 714
  TPP-27477_18206-gl10-gl25-hIgG1Lambda_VL_DNA

SEQ ID NO: 839 - DNA, 42 bp, Artificial Sequence; identical to SEQ ID NO: 432
  TPP-27477_18206-gl10-gl25-hIgG1Lambda_LCDR1_DNA

SEQ ID NO: 840 - DNA, 21 bp, Artificial Sequence
  TPP-27477_18206-gl10-gl25-hIgG1Lambda_LCDR2_DNA
accaacaacagacggcccagc

SEQ ID NO: 841 - DNA, 33 bp, Artificial Sequence; identical to SEQ ID NO: 434
  TPP-27477_18206-gl10-gl25-hIgG1Lambda_LCDR3_DNA

SEQ ID NO: 842 - protein, 451 aa, Artificial Sequence; identical to SEQ ID NO: 615
  TPP-27477_18206-gl10-gl25-hIgG1Lambda_HC_PRT

SEQ ID NO: 843 - protein, 217 aa, Artificial Sequence; identical to SEQ ID NO: 719
  TPP-27477_18206-gl10-gl25-hIgG1Lambda_LC_PRT

SEQ ID NO: 844 - DNA, 1353 bp, Artificial Sequence; identical to SEQ ID NO: 820
  TPP-27477_18206-gl10-gl25-hIgG1Lambda_HC_DNA

SEQ ID NO: 845 - DNA, 651 bp, Artificial Sequence; identical to SEQ ID NO: 721
  TPP-27477_18206-gl10-gl25-hIgG1Lambda_LC_DNA

SEQ ID NO: 846 - protein, 122 aa, Artificial Sequence; identical to SEQ ID NO: 599
  TPP-27478_18206-gl11-gl25-hIgG1Lambda_VH_PRT

SEQ ID NO: 847 - protein, 5 aa, Artificial Sequence
  TPP-27478_18206-gl11-gl25-hIgG1Lambda_HCDR1_PRT
SYGMH

SEQ ID NO: 848 - protein, 17 aa, Artificial Sequence
  TPP-27478_18206-gl11-gl25-hIgG1Lambda_HCDR2_PRT
AINWNGGSTGYADSVKG

SEQ ID NO: 849 - protein, 13 aa, Artificial Sequence
  TPP-27478_18206-gl11-gl25-hIgG1Lambda_HCDR3_PRT
GHHSGYDGRFFDY

SEQ ID NO: 850 - protein, 111 aa, Artificial Sequence; identical to SEQ ID NO: 684
  TPP-27478_18206-gl11-gl25-hIgG1Lambda_VL_PRT

SEQ ID NO: 851 - protein, 14 aa, Artificial Sequence
  TPP-27478_18206-gl11-gl25-hIgG1Lambda_LCDR1_PRT
TGSSSNIGAGYNVH

SEQ ID NO: 852 - protein, 7 aa, Artificial Sequence
  TPP-27478_18206-gl11-gl25-hIgG1Lambda_LCDR2_PRT
TNNRRPS

SEQ ID NO: 853 - protein, 11 aa, Artificial Sequence
  TPP-27478_18206-gl11-gl25-hIgG1Lambda_LCDR3_PRT
AAWDASLSGWV

SEQ ID NO: 854 - DNA, 366 bp, Artificial Sequence; identical to SEQ ID NO: 607
  TPP-27478_18206-gl11-gl25-hIgG1Lambda_VH_DNA

SEQ ID NO: 855 - DNA, 15 bp, Artificial Sequence
  TPP-27478_18206-gl11-gl25-hIgG1Lambda_HCDR1_DNA
agctatggcatgcac

SEQ ID NO: 856 - DNA, 51 bp, Artificial Sequence; identical to SEQ ID NO: 609
  TPP-27478_18206-gl11-gl25-hIgG1Lambda_HCDR2_DNA

SEQ ID NO: 857 - DNA, 39 bp, Artificial Sequence; identical to SEQ ID NO: 430
  TPP-27478_18206-gl11-gl25-hIgG1Lambda_HCDR3_DNA

SEQ ID NO: 858 - DNA, 333 bp, Artificial Sequence; identical to SEQ ID NO: 692
  TPP-27478_18206-gl11-gl25-hIgG1Lambda_VL_DNA

SEQ ID NO: 859 - DNA, 42 bp, Artificial Sequence; identical to SEQ ID NO: 486
  TPP-27478_18206-gl11-gl25-hIgG1Lambda_LCDR1_DNA

SEQ ID NO: 860 - DNA, 21 bp, Artificial Sequence
  TPP-27478_18206-gl11-gl25-hIgG1Lambda_LCDR2_DNA
accaacaacagacggcccagc

SEQ ID NO: 861 - DNA, 33 bp, Artificial Sequence; identical to SEQ ID NO: 434
  TPP-27478_18206-gl11-gl25-hIgG1Lambda_LCDR3_DNA

SEQ ID NO: 862 - protein, 451 aa, Artificial Sequence; identical to SEQ ID NO: 615
  TPP-27478_18206-gl11-gl25-hIgG1Lambda_HC_PRT

SEQ ID NO: 863 - protein, 217 aa, Artificial Sequence; identical to SEQ ID NO: 697
  TPP-27478_18206-gl11-gl25-hIgG1Lambda_LC_PRT

SEQ ID NO: 864 - DNA, 1353 bp, Artificial Sequence; identical to SEQ ID NO: 820
  TPP-27478_18206-gl11-gl25-hIgG1Lambda_HC_DNA

SEQ ID NO: 865 - DNA, 651 bp, Artificial Sequence; identical to SEQ ID NO: 699
  TPP-27478_18206-gl11-gl25-hIgG1Lambda_LC_DNA

SEQ ID NO: 866 - protein, 122 aa, Artificial Sequence; identical to SEQ ID NO: 660
  TPP-27479_18206-gl13-gl14-hIgG1Lambda_VH_PRT

SEQ ID NO: 867 - protein, 5 aa, Artificial Sequence
  TPP-27479_18206-gl13-gl14-hIgG1Lambda_HCDR1_PRT
SYGMH

SEQ ID NO: 868 - protein, 17 aa, Artificial Sequence
  TPP-27479_18206-gl13-gl14-hIgG1Lambda_HCDR2_PRT
GINWNGGSTGYADSVKG

SEQ ID NO: 869 - protein, 13 aa, Artificial Sequence
  TPP-27479_18206-gl13-gl14-hIgG1Lambda_HCDR3_PRT
GHHSGYDGRFFDY

SEQ ID NO: 870 - protein, 111 aa, Artificial Sequence; identical to SEQ ID NO: 477
  TPP-27479_18206-gl13-gl14-hIgG1Lambda_VL_PRT

SEQ ID NO: 871 - protein, 14 aa, Artificial Sequence
  TPP-27479_18206-gl13-gl14-hIgG1Lambda_LCDR1_PRT
TGSSSNIGAGYNVH

SEQ ID NO: 872 - protein, 7 aa, Artificial Sequence
  TPP-27479_18206-gl13-gl14-hIgG1Lambda_LCDR2_PRT
TNNRRPS

SEQ ID NO: 873 - protein, 11 aa, Artificial Sequence
  TPP-27479_18206-gl13-gl14-hIgG1Lambda_LCDR3_PRT
AAWDASLSGWV

SEQ ID NO: 874 - DNA, 366 bp, Artificial Sequence; identical to SEQ ID NO: 668
  TPP-27479_18206-gl13-gl14-hIgG1Lambda_VH_DNA

SEQ ID NO: 875 - DNA, 15 bp, Artificial Sequence
  TPP-27479_18206-gl13-gl14-hIgG1Lambda_HCDR1_DNA
agctatggcatgcac

SEQ ID NO: 876 - DNA, 51 bp, Artificial Sequence; identical to SEQ ID NO: 429
  TPP-27479_18206-gl13-gl14-hIgG1Lambda_HCDR2_DNA

SEQ ID NO: 877 - DNA, 39 bp, Artificial Sequence; identical to SEQ ID NO: 430
  TPP-27479_18206-gl13-gl14-hIgG1Lambda_HCDR3_DNA

SEQ ID NO: 878 - DNA, 333 bp, Artificial Sequence; identical to SEQ ID NO: 485
  TPP-27479_18206-gl13-gl14-hIgG1Lambda_VL_DNA

SEQ ID NO: 879 - DNA, 42 bp, Artificial Sequence; identical to SEQ ID NO: 486
  TPP-27479_18206-gl13-gl14-hIgG1Lambda_LCDR1_DNA

SEQ ID NO: 880 - DNA, 21 bp, Artificial Sequence
  TPP-27479_18206-gl13-gl14-hIgG1Lambda_LCDR2_DNA
accaacaacagacggcccagc

SEQ ID NO: 881 - DNA, 33 bp, Artificial Sequence; identical to SEQ ID NO: 434
  TPP-27479_18206-gl13-gl14-hIgG1Lambda_LCDR3_DNA

SEQ ID NO: 882 - protein, 451 aa, Artificial Sequence; identical to SEQ ID NO: 778
  TPP-27479_18206-gl13-gl14-hIgG1Lambda_HC_PRT

SEQ ID NO: 883 - protein, 217 aa, Artificial Sequence; identical to SEQ ID NO: 490
  TPP-27479_18206-gl13-gl14-hIgG1Lambda_LC_PRT

SEQ ID NO: 884 - DNA, 1353 bp, Artificial Sequence; identical to SEQ ID NO: 780
  TPP-27479_18206-gl13-gl14-hIgG1Lambda_HC_DNA

SEQ ID NO: 885 - DNA, 651 bp, Artificial Sequence; identical to SEQ ID NO: 679
  TPP-27479_18206-gl13-gl14-hIgG1Lambda_LC_DNA

SEQ ID NO: 886 - protein, 122 aa, Artificial Sequence; identical to SEQ ID NO: 782
  TPP-27480_18206-gl13-gl20-hIgG1Lambda_VH_PRT

SEQ ID NO: 887 - protein, 5 aa, Artificial Sequence
  TPP-27480_18206-gl13-gl20-hIgG1Lambda_HCDR1_PRT
HYGMH

SEQ ID NO: 888 - protein, 17 aa, Artificial Sequence
  TPP-27480_18206-gl13-gl20-hIgG1Lambda_HCDR2_PRT
AINWNGGSTGYADSVKG

SEQ ID NO: 889 - protein, 13 aa, Artificial Sequence
  TPP-27480_18206-gl13-gl20-hIgG1Lambda_HCDR3_PRT
GHHSGYDGRFFDY

SEQ ID NO: 890 - protein, 111 aa, Artificial Sequence; identical to SEQ ID NO: 477
  TPP-27480_18206-gl13-gl20-hIgG1Lambda_VL_PRT

SEQ ID NO: 891 - protein, 14 aa, Artificial Sequence
  TPP-27480_18206-gl13-gl20-hIgG1Lambda_LCDR1_PRT
TGSSSNIGAGYNVH

SEQ ID NO: 892 - protein, 7 aa, Artificial Sequence
  TPP-27480_18206-gl13-gl20-hIgG1Lambda_LCDR2_PRT
TNNRRPS

SEQ ID NO: 893 - protein, 11 aa, Artificial Sequence
  TPP-27480_18206-gl13-gl20-hIgG1Lambda_LCDR3_PRT
AAWDASLSGWV

SEQ ID NO: 894 - DNA, 366 bp, Artificial Sequence; identical to SEQ ID NO: 790
  TPP-27480_18206-gl13-gl20-hIgG1Lambda_VH_DNA

SEQ ID NO: 895 - DNA, 15 bp, Artificial Sequence
  TPP-27480_18206-gl13-gl20-hIgG1Lambda_HCDR1_DNA
cactatggcatgcac

SEQ ID NO: 896 - DNA, 51 bp, Artificial Sequence; identical to SEQ ID NO: 609
  TPP-27480_18206-gl13-gl20-hIgG1Lambda_HCDR2_DNA

SEQ ID NO: 897 - DNA, 39 bp, Artificial Sequence; identical to SEQ ID NO: 430
  TPP-27480_18206-gl13-gl20-hIgG1Lambda_HCDR3_DNA

SEQ ID NO: 898 - DNA, 333 bp, Artificial Sequence; identical to SEQ ID NO: 485
  TPP-27480_18206-gl13-gl20-hIgG1Lambda_VL_DNA

SEQ ID NO: 899 - DNA, 42 bp, Artificial Sequence; identical to SEQ ID NO: 486
  TPP-27480_18206-gl13-gl20-hIgG1Lambda_LCDR1_DNA

SEQ ID NO: 900 - DNA, 21 bp, Artificial Sequence
  TPP-27480_18206-gl13-gl20-hIgG1Lambda_LCDR2_DNA
accaacaacagacggcccagc

SEQ ID NO: 901 - DNA, 33 bp, Artificial Sequence; identical to SEQ ID NO: 434
  TPP-27480_18206-gl13-gl20-hIgG1Lambda_LCDR3_DNA

SEQ ID NO: 902 - protein, 451 aa, Artificial Sequence; identical to SEQ ID NO: 798
  TPP-27480_18206-gl13-gl20-hIgG1Lambda_HC_PRT

SEQ ID NO: 903 - protein, 217 aa, Artificial Sequence; identical to SEQ ID NO: 490
  TPP-27480_18206-gl13-gl20-hIgG1Lambda_LC_PRT

SEQ ID NO: 904 - DNA, 1353 bp, Artificial Sequence; identical to SEQ ID NO: 800
  TPP-27480_18206-gl13-gl20-hIgG1Lambda_HC_DNA

SEQ ID NO: 905 - DNA, 651 bp, Artificial Sequence; identical to SEQ ID NO: 679
  TPP-27480_18206-gl13-gl20-hIgG1Lambda_LC_DNA

SEQ ID NO: 906 - protein, 122 aa, Artificial Sequence; identical to SEQ ID NO: 419
  TPP-29367_18206-hIgG1wtLambda_VH_PRT

SEQ ID NO: 907 - protein, 5 aa, Artificial Sequence
  TPP-29367_18206-hIgG1wtLambda_HCDR1_PRT
HYGMH

SEQ ID NO: 908 - protein, 17 aa, Artificial Sequence
  TPP-29367_18206-hIgG1wtLambda_HCDR2_PRT
GINWNGGSTGYADSVKG

SEQ ID NO: 909 - protein, 13 aa, Artificial Sequence
  TPP-29367_18206-hIgG1wtLambda_HCDR3_PRT
GHHSGYDGRFFDY

SEQ ID NO: 910 - protein, 111 aa, Artificial Sequence; identical to SEQ ID NO: 423
  TPP-29367_18206-hIgG1wtLambda_VL_PRT

SEQ ID NO: 911 - protein, 14 aa, Artificial Sequence
  TPP-29367_18206-hIgG1wtLambda_LCDR1_PRT
TGSSSNIGAGYNVH

SEQ ID NO: 912 - protein, 7 aa, Artificial Sequence
  TPP-29367_18206-hIgG1wtLambda_LCDR2_PRT
TNNRRPS

SEQ ID NO: 913 - protein, 11 aa, Artificial Sequence
  TPP-29367_18206-hIgG1wtLambda_LCDR3_PRT
AAWDASLSGWV

SEQ ID NO: 914 - DNA, 366 bp, Artificial Sequence; identical to SEQ ID NO: 427
  TPP-29367_18206-hIgG1wtLambda_VH_DNA

SEQ ID NO: 915 - DNA, 15 bp, Artificial Sequence
  TPP-29367_18206-hIgG1wtLambda_HCDR1_DNA
cactatggcatgcac

SEQ ID NO: 916 - DNA, 51 bp, Artificial Sequence; identical to SEQ ID NO: 429
  TPP-29367_18206-hIgG1wtLambda_HCDR2_DNA

SEQ ID NO: 917 - DNA, 39 bp, Artificial Sequence; identical to SEQ ID NO: 430
  TPP-29367_18206-hIgG1wtLambda_HCDR3_DNA

SEQ ID NO: 918 - DNA, 333 bp, Artificial Sequence; identical to SEQ ID NO: 431
  TPP-29367_18206-hIgG1wtLambda_VL_DNA

SEQ ID NO: 919 - DNA, 42 bp, Artificial Sequence; identical to SEQ ID NO: 432
  TPP-29367_18206-hIgG1wtLambda_LCDR1_DNA

SEQ ID NO: 920 - DNA, 21 bp, Artificial Sequence
  TPP-29367_18206-hIgG1wtLambda_LCDR2_DNA
accaacaacagacggcccagc

SEQ ID NO: 921 - DNA, 33 bp, Artificial Sequence; identical to SEQ ID NO: 434
  TPP-29367_18206-hIgG1wtLambda_LCDR3_DNA

SEQ ID NO: 922 - protein, 452 aa, Artificial Sequence
  TPP-29367_18206-hIgG1wtLambda_HC_PRT
EVQLLESGGGLVQPGGSLRLSCAASGFTFSHYGMHWVRQAPGKGLEWVSGINWNGGSTGYADSVKGRFTISRDNSKNTLYLQMNSLRAEDTAVYYCARGHHSGYDGRFFDYWGQGTLVTVSSASTKGPSVFPLAPSSKSTSGGTAALGCLVKDYFPEPVTVSWNSGALTSGVHTFPAVLQSSGLYSLSSVVTVPSSSLGTQTYICNVNHKPSNTKVDKKVEPKSCDKTHTCPPCPAPELLGGPSVFLFPPKPKDTLMISRTPEVTCVVVDVSHEDPEVKFNWYVDGVEVHNAKTKPREEQYNSTYRVVSVLTVLHQDWLNGKEYKCKVSNKALPAPIEKTISKAKGQPREPQVYTLPPSRDELTKNQVSLTCLVKGFYPSDIAVEWESNGQPENNYKTTPPVLDSDGSFFLYSKLTVDKSRWQQGNVFSCSVMHEALHNHYTQKSLSLSPGK

SEQ ID NO: 923 - protein, 217 aa, Artificial Sequence; identical to SEQ ID NO: 436
  TPP-29367_18206-hIgG1wtLambda_LC_PRT

SEQ ID NO: 924 - DNA, 1356 bp, Artificial Sequence
  TPP-29367_18206-hIgG1wtLambda_HC_DNA
gaagttcagctgctggaatctggcggcggactggttcaacctggcggatctctgagactgagctgtgccgccagcggcttcacctttagccactatggcatgcactgggtccgacaggcccctggcaaaggacttgaatgggtgtccggcatcaactggaatggcggctctacaggctacgccgactctgtgaagggcagattcaccatcagccgggacaacagcaagaacaccctgtacctgcagatgaactccctgagagccgaggacaccgccgtgtactattgtgccagaggccaccacagcggctacgacggcagattctttgactattggggccagggcaccctggtcacagtttcttcagccagcaccaagggccccagcgtgttccctctggcccctagcagcaagagcacatctggcggaacagccgccctgggctgcctcgtgaaggactactttcccgagcccgtgaccgtgtcctggaactctggcgctctgacaagcggcgtgcacacctttccagccgtgctgcagagcagcggcctgtactctctgagcagcgtcgtgacagtgcccagcagctctctgggcacccagacctacatctgcaacgtgaaccacaagcccagcaacaccaaggtggacaagaaggtggaacccaagagctgcgacaagacccacacctgtcccccttgtcctgcccccgaactgctgggaggcccttccgtgttcctgttccccccaaagcccaaggacaccctgatgatcagccggacccccgaagtgacctgcgtggtggtggatgtgtcccacgaggaccctgaagtgaagttcaattggtacgtggacggcgtggaagtgcacaacgccaagaccaagcctagagaggaacagtacaacagcacctaccgggtggtgtccgtgctgacagtgctgcaccaggactggctgaacggcaaagagtacaagtgcaaggtgtccaacaaggccctgcctgcccccatcgagaaaaccatcagcaaggccaagggccagccccgcgaaccccaggtgtacacactgcccccaagcagggacgagctgaccaagaaccaggtgtccctgacctgtctcgtgaaaggcttctacccctccgatatcgccgtggaatgggagagcaacggccagcccgagaacaactacaagaccaccccccctgtgctggacagcgacggctcattcttcctgtacagcaagctgaccgtggacaagtcccggtggcagcagggcaacgtgttcagctgcagcgtgatgcacgaggccctgcacaaccactacacccagaagtccctgagcctgagccctggcaag

SEQ ID NO: 925 - DNA, 651 bp, Artificial Sequence; identical to SEQ ID NO: 701
  TPP-29367_18206-hIgG1wtLambda_LC_DNA

SEQ ID NO: 926 - protein, 122 aa, Artificial Sequence; identical to SEQ ID NO: 419
  TPP-29368_18432-hIgG1wtLambda_VH_PRT

SEQ ID NO: 927 - protein, 5 aa, Artificial Sequence
  TPP-29368_18432-hIgG1wtLambda_HCDR1_PRT
HYGMH

SEQ ID NO: 928 - protein, 17 aa, Artificial Sequence
  TPP-29368_18432-hIgG1wtLambda_HCDR2_PRT
GINWNGGSTGYADSVKG

SEQ ID NO: 929 - protein, 13 aa, Artificial Sequence
  TPP-29368_18432-hIgG1wtLambda_HCDR3_PRT
GHHSGYDGRFFDY

SEQ ID NO: 930 - protein, 111 aa, Artificial Sequence; identical to SEQ ID NO: 477
  TPP-29368_18432-hIgG1wtLambda_VL_PRT

SEQ ID NO: 931 - protein, 14 aa, Artificial Sequence
  TPP-29368_18432-hIgG1wtLambda_LCDR1_PRT
TGSSSNIGAGYNVH

SEQ ID NO: 932 - protein, 7 aa, Artificial Sequence
  TPP-29368_18432-hIgG1wtLambda_LCDR2_PRT
TNNRRPS

SEQ ID NO: 933 - protein, 11 aa, Artificial Sequence
  TPP-29368_18432-hIgG1wtLambda_LCDR3_PRT
AAWDASLSGWV

SEQ ID NO: 934 - DNA, 366 bp, Artificial Sequence; identical to SEQ ID NO: 427
  TPP-29368_18432-hIgG1wtLambda_VH_DNA

SEQ ID NO: 935 - DNA, 15 bp, Artificial Sequence
  TPP-29368_18432-hIgG1wtLambda_HCDR1_DNA
cactatggcatgcac

SEQ ID NO: 936 - DNA, 51 bp, Artificial Sequence; identical to SEQ ID NO: 429
  TPP-29368_18432-hIgG1wtLambda_HCDR2_DNA

SEQ ID NO: 937 - DNA, 39 bp, Artificial Sequence; identical to SEQ ID NO: 430
  TPP-29368_18432-hIgG1wtLambda_HCDR3_DNA

SEQ ID NO: 938 - DNA, 333 bp, Artificial Sequence; identical to SEQ ID NO: 485
  TPP-29368_18432-hIgG1wtLambda_VL_DNA

SEQ ID NO: 939 - DNA, 42 bp, Artificial Sequence; identical to SEQ ID NO: 486
  TPP-29368_18432-hIgG1wtLambda_LCDR1_DNA

SEQ ID NO: 940 - DNA, 21 bp, Artificial Sequence
  TPP-29368_18432-hIgG1wtLambda_LCDR2_DNA
accaacaacagacggcccagc

SEQ ID NO: 941 - DNA, 33 bp, Artificial Sequence; identical to SEQ ID NO: 434
  TPP-29368_18432-hIgG1wtLambda_LCDR3_DNA

SEQ ID NO: 942 - protein, 452 aa, Artificial Sequence; identical to SEQ ID NO: 922
  TPP-29368_18432-hIgG1wtLambda_HC_PRT

SEQ ID NO: 943 - protein, 217 aa, Artificial Sequence; identical to SEQ ID NO: 490
  TPP-29368_18432-hIgG1wtLambda_LC_PRT

SEQ ID NO: 944 - DNA, 1356 bp, Artificial Sequence; identical to SEQ ID NO: 924
  TPP-29368_18432-hIgG1wtLambda_HC_DNA

SEQ ID NO: 945 - DNA, 651 bp, Artificial Sequence; identical to SEQ ID NO: 679
  TPP-29368_18432-hIgG1wtLambda_LC_DNA

SEQ ID NO: 946 - protein, 122 aa, Artificial Sequence; identical to SEQ ID NO: 599
  TPP-29369_19571-hIgG1wtlambda_VH_PRT

SEQ ID NO: 947 - protein, 5 aa, Artificial Sequence
  TPP-29369_19571-hIgG1wtlambda_HCDR1_PRT
SYGMH

SEQ ID NO: 948 - protein, 17 aa, Artificial Sequence
  TPP-29369_19571-hIgG1wtlambda_HCDR2_PRT
AINWNGGSTGYADSVKG

SEQ ID NO: 949 - protein, 13 aa, Artificial Sequence
  TPP-29369_19571-hIgG1wtlambda_HCDR3_PRT
GHHSGYDGRFFDY

SEQ ID NO: 950 - protein, 111 aa, Artificial Sequence; identical to SEQ ID NO: 423
  TPP-29369_19571-hIgG1wtlambda_VL_PRT

SEQ ID NO: 951 - protein, 14 aa, Artificial Sequence
  TPP-29369_19571-hIgG1wtlambda_LCDR1_PRT
TGSSSNIGAGYNVH

SEQ ID NO: 952 - protein, 7 aa, Artificial Sequence
  TPP-29369_19571-hIgG1wtlambda_LCDR2_PRT
TNNRRPS

SEQ ID NO: 953 - protein, 11 aa, Artificial Sequence
  TPP-29369_19571-hIgG1wtlambda_LCDR3_PRT
AAWDASLSGWV

SEQ ID NO: 954 - DNA, 366 bp, Artificial Sequence; identical to SEQ ID NO: 607
  TPP-29369_19571-hIgG1wtlambda_VH_DNA

SEQ ID NO: 955 - DNA, 15 bp, Artificial Sequence
  TPP-29369_19571-hIgG1wtlambda_HCDR1_DNA
agctatggcatgcac

SEQ ID NO: 956 - DNA, 51 bp, Artificial Sequence; identical to SEQ ID NO: 609
  TPP-29369_19571-hIgG1wtlambda_HCDR2_DNA

SEQ ID NO: 957 - DNA, 39 bp, Artificial Sequence; identical to SEQ ID NO: 430
  TPP-29369_19571-hIgG1wtlambda_HCDR3_DNA

SEQ ID NO: 958 - DNA, 333 bp, Artificial Sequence; identical to SEQ ID NO: 431
  TPP-29369_19571-hIgG1wtlambda_VL_DNA

SEQ ID NO: 959 - DNA, 42 bp, Artificial Sequence; identical to SEQ ID NO: 432
  TPP-29369_19571-hIgG1wtlambda_LCDR1_DNA

SEQ ID NO: 960 - DNA, 21 bp, Artificial Sequence
  TPP-29369_19571-hIgG1wtlambda_LCDR2_DNA
accaacaacagacggcccagc

SEQ ID NO: 961 - DNA, 33 bp, Artificial Sequence; identical to SEQ ID NO: 434
  TPP-29369_19571-hIgG1wtlambda_LCDR3_DNA

SEQ ID NO: 962 - protein, 452 aa, Artificial Sequence; identical to SEQ ID NO: 633
  TPP-29369_19571-hIgG1wtlambda_HC_PRT

SEQ ID NO: 963 - protein, 217 aa, Artificial Sequence; identical to SEQ ID NO: 436
  TPP-29369_19571-hIgG1wtlambda_LC_PRT

SEQ ID NO: 964 - DNA, 1356 bp, Artificial Sequence; identical to SEQ ID NO: 698
  TPP-29369_19571-hIgG1wtlambda_HC_DNA

SEQ ID NO: 965 - DNA, 651 bp, Artificial Sequence; identical to SEQ ID NO: 701
  TPP-29369_19571-hIgG1wtlambda_LC_DNA
